(19) United States
(12) Patent Application Publication
(10) Pub. No.: US 2011/0250663 A1
(43) Pub. Date: Oct. 13, 2011

(54) METHODS AND COMPOSITIONS RELATED TO FATTY ALCOHOL BIOSYNTHETIC ENZYMES

(75) Inventors: Andreas W. Schirmer, South San Francisco, CA (US); Na M. Trinh, South San Francisco, CA (US)

(73) Assignee: LS9, INC., South San Francisco, CA (US)

(21) Appl. No.: 13/083,066

(22) Filed: Apr. 8, 2011

Related U.S. Application Data
(60) Provisional application No. 61/321,877, filed on Apr. 8, 2010.
(60) Provisional application No. 61/321,878, filed on Apr. 8, 2010.

(51) Int. Cl. C12P 7/04; C07C 11/00; C12N 1/00; C12P 5/00; C12P 5/02

(52) U.S. Cl. 435/157; 435/166; 435/167; 435/243; 585/16

(57) ABSTRACT

Compositions and methods for producing fatty acid derivatives using recombinant microorganisms are described herein.

### CROSS-REFERENCE TO RELATED APPLICATIONS

[0001] This application claims priority benefit to U.S. Provisional Application Ser. Nos. 61/321,877, and 61/321,878, filed on Apr. 8, 2010, which are expressly incorporated by reference herein in their entirety.

### FIELD OF THE INVENTION

[0002] Compositions, methods and systems effective to produce fatty acid derivatives.

### BACKGROUND OF THE TECHNOLOGY

[0003] Petroleum is a limited, natural resource found in the Earth in liquid, gaseous, or solid forms. Petroleum is a valuable resource for producing various industrial materials. But petroleum products are developed at considerable costs, both financial and environmental. In addition to the economic cost, petroleum exploration carries a high environmental cost. In its natural form, crude petroleum extracted from the Earth has few commercial uses. It is a mixture of hydrocarbons (e.g., paraffins (or alkanes), olefins (or alkenes), alkynes, napthenes (or cycloalkanes), aliphatic compounds, aromatic compounds, etc.) of varying length and complexity. Hence, crude petroleum must be refined and purified before it can be used commercially. Crude petroleum is also a primary source of raw materials for producing petrochemicals. The two main classes of raw materials derived from petroleum are short chain olefins (e.g., ethylene and propylene) and aromatics (e.g., benzene and xylene isomers). These raw materials are derived from longer chain hydrocarbons in crude petroleum by cracking it at considerable expense using a variety of methods, such as catalytic cracking, steam cracking, or catalytic reforming. These raw materials are used to make petrochemicals, which cannot be directly refined from crude petroleum, such as monomers, solvents, detergents, or adhesives.

[0004] These petrochemicals can then be used to make specialty chemicals, such as plastics, resins, fibers, elastomers, pharmaceuticals, lubricants, or gels. Particular specialty chemicals that can be produced from petrochemical raw materials are fatty acids, hydrocarbons (e.g., long chain, branched chain, saturated, unsaturated, etc.), fatty alcohols, esters, fatty aldehydes, ketones, lubricants, etc.

[0005] Fatty alcohols have many commercial uses. The shorter chain fatty alcohols are used in the cosmetic and food industries as emulsifiers, emollients, and thickeners. Due to their amphiphilic nature, fatty alcohols behave as nonionic surfactants, which are useful in personal care and household products, for example, detergents. In addition, fatty alcohols are used in waxes, gums, resins, pharmaceutical salves and lotions, lubricating oil additives, textile antistatic and finishing agents, plasticizers, cosmetics, industrial solvents, and solvents for fats.

[0006] Hydrocarbons have many commercial uses. For example, shorter chain alkanes are used as fuels. Longer chain alkanes (e.g., from five to sixteen carbons) are used as transportation fuels (e.g., gasoline, diesel, or aviation fuel). Alkanes having more than sixteen carbon atoms are important components of fuel oils and lubricating oils. Even longer alkanes, which are solid at room temperature, can be used, for example, as a paraffin wax. In addition, longer chain alkanes can be cracked to produce commercially valuable shorter chain hydrocarbons.

[0007] Like short chain alkanes, short chain alkenes are used in transportation fuels. Longer chain alkenes are used in plastics, lubricants, and synthetic lubricants. In addition, alkenes are used as a feedstock to produce alcohols, esters, plasticizers, surfactants, tertiary amines, enhanced oil recovery agents, fatty acids, thiols, alkenylsuccinic anhydrides, epoxides, chlorinated alkanes, chlorinated alkenes, waxes, fuel additives, and drag flow reducers.

[0008] Esters have many commercial uses. For example, biodiesel, an alternative fuel, is comprised of esters (e.g., fatty acid methyl esters, fatty acid ethyl esters, etc). Some low molecular weight esters are volatile with a pleasant odor, which makes them useful as fragrances or flavoring agents. In addition, esters are used as solvents for lacquers, paints, and varnishes. Furthermore, some naturally occurring substances, such as waxes, fats, and oils are comprised of esters. Esters are also used as softening agents in resins and plasticizers, flame retardants, and additives in gasoline and oil. In addition, esters can be used in the manufacture of polymers, films, textiles, dyes, and pharmaceuticals.

[0009] Aldehydes are used to produce many specialty chemicals. For example, aldehydes are used to produce polymers, resins (e.g., Bakelite), dyes, flavorings, plasticizers, perfumes, pharmaceuticals, and other chemicals. Some are used as solvents, preservatives, or disinfectants. Some natural and synthetic compounds, such as vitamins and hormones, are aldehydes.

[0010] Obtaining specialty chemicals from crude petroleum requires a significant financial investment as well as a great deal of energy. It is also an inefficient process because frequently the long chain hydrocarbons in crude petroleum are cracked to produce smaller monomers. These monomers are then used as the raw material to manufacture the more complex specialty chemicals.

[0011] Finally, the burning of petroleum based fuels releases greenhouse gases (e.g., carbon dioxide) and other forms of air pollution (e.g., carbon monoxide, sulfur dioxide, etc.). As the world's demand for fuel increases, the emission of greenhouse gases and other forms of air pollution also increases. The accumulation of greenhouse gases in the atmosphere can lead to an increase global warming. Hence, in addition to damaging the environment locally (e.g., oil spills, dredging of marine environments, etc.), burning petroleum also damages the environment globally.

[0012] Due to the inherent challenges posed by petroleum, there is a need for a renewable petroleum source. For similar reasons, there is also a need for a renewable source of chemicals which are typically derived from petroleum. The current invention addresses these needs.

### BRIEF SUMMARY OF THE INVENTION

[0013] The invention provides recombinant microorganisms engineered to produce fatty acid derivatives and methods of use wherein the recombinant microorganisms comprise polynucleotide sequences encoding: (a) a fatty aldehyde biosynthetic polypeptide and (b) a fatty alcohol biosynthetic polypeptide, wherein the expression of the polypeptides is modified relative to the corresponding wild type polypeptides and the microorganism produces an increased titer of the fatty acid derivative relative to a wild type microorganism. The recombinant microorganisms may further comprise a thioesterase (EC 3.1.1.5).

[0014] Exemplary fatty aldehyde biosynthetic polypeptides: (a) have at least 90% sequence identity to the amino acid sequence presented as SEQ ID NO: 41, 43, 45, 47, 49, 51, 53, 55, 57, 59, 61, 63, 65, 69, 71, 73, 75, 77, 79, 81, 83, 85, 87, 89, 91, 93, 97, 99, 101, 103, 105, 107, 109, 111, 113, 115, 117, 119, 121, 123, 125, or 127; (b) comprise an amino acid sequence motif with a sequence presented as (1) SEQ ID NO:129, SEQ ID NO:130, SEQ ID NO:131, and SEQ ID NO:132; (2) SEQ ID NO:133; SEQ ID NO:134; SEQ ID NO:135; SEQ ID NO: 136; or (3) SEQ ID NO:129, SEQ ID NO:131, SEQ ID NO:132 or SEQ ID NO:133; or (c) are encoded by a polynucleotide having at least 90% sequence identity to the nucleotide sequence presented as SEQ ID NO: 42, 44, 46, 48, 50, 52, 54, 56, 58, 60, 62, 64, 66, 68, 70, 72, 74, 76, 78, 80, 82, 84, 86, 88, 90, 92, 94, 96, 98, 100, 102, 104, 106, 108, 110, 112, 114, 116, 118, 120, 122, 124, 126, or 128.

[0015] Methods for producing a fatty alcohol, comprising culturing such an engineered microorganism in the presence of a carbon source, under conditions wherein the fatty alcohol is produced at a titer of at least 300 mg/L, are further provided.

[0016] In practicing the claimed methods, the engineered microorganism may be modified: (a) to express an attenuated level of an acyl-CoA synthase (EC 2.3.1.86) or (b) to further comprise an acyl-ACP reductase polypeptide, wherein (i) the acyl-ACP reductase polypeptide has amino acid sequence with at least 90% sequence identity to SEQ ID NO: 137, 139, 141, 143, 145, 147, 149, 151, or 153, (ii) the acyl-ACP reductase polypeptide has an amino acid motif presented as SEQ ID NO:155, 156, 157, 158, 159, 160, 161, 162, 163, 164, or 165, or (iii) the acyl-ACP reductase polypeptide is encoded by a polynucleotide having at least 90% sequence identity to SEQ ID NO: 138, 140, 142, 144, 146, 148, 150, 152, or 154.

[0017] In practicing the claimed methods, expression of a fatty alcohol biosynthetic polypeptide (e.g., fatty aldehyde reductase or alcohol dehydrogenase (EC 1.1.1.1)) in the engineered microorganism may be increased or attenuated relative to the corresponding wild type polypeptide, or the gene encoding the fatty alcohol biosynthetic polypeptide may be knocked-out.

[0018] The fatty alcohol biosynthetic polypeptide may (a) have at least 90% sequence identity to a polypeptide sequence selected from the group consisting of SEQ ID NO:1, 3, 5, 7, 9, 11, 13, 15, 17, 19, 21, 23, 25, 27, 29, 31, 33, 35, 37, and 39, or (b) be encoded by a polynucleotide having at least 90% sequence identity to the nucleotide sequence of SEQ ID NO: 2, 4, 6, 8, 10, 12, 14, 16, 18, 20, 22, 24, 26, 28, 30, 32, 34, 36, 38, or 40.

[0019] The fatty alcohol produced by the claimed method may (a) comprise a C₆-C₁₈ fatty alcohol (e.g., a C₆, C₈, C₁₀, C₁₂, C₁₃, C₁₄, C₁₅, C₁₆, C₁₇, or C₁₈ fatty alcohol); (b) have the hydroxyl group is in the primary (C₁) position; (c) be a saturated or unsaturated fatty alcohol; (d) be unsaturated at the omega-7 position; or (e) comprise a cis double bond.

[0020] The invention further provides recombinant microorganisms engineered to produce hydrocarbons and methods of use wherein the recombinant microorganism further comprises (a) a hydrocarbon biosynthetic polypeptide having the amino acid sequence of SEQ ID NO:166, 168, 170, 172, 174, 176, 178, 180, 182, 184, 186, 188, 190, 192, 194, 196, 198, or 200 with one or more amino acid substitutions, additions, deletions, or insertions; (b) a polynucleotide sequence encoding a hydrocarbon biosynthetic polypeptide, having at least 90% sequence identity to the amino acid sequence of SEQ ID NO:166, 168, 170, 172, 174, 176, 178, 180, 182, 184, 186, 188, 190, 192, 194, 196, 198, or 200, or (c) a hydrocarbon biosynthetic polypeptide having the amino acid motif sequences presented as (1) SEQ ID NO:202; (2) SEQ ID NO:203 or SEQ ID NO:204, or SEQ ID NO:205; (3) SEQ ID NO:206, and any one of SEQ ID NO:203, SEQ ID NO:204, SEQ ID NO:205; or (4) SEQ ID NO:207 or SEQ ID NO:208, or SEQ ID NO:209, or SEQ ID NO:210, wherein the hydrocarbon biosynthetic polypeptide has decarbonylase activity.

[0021] Methods for producing a hydrocarbon, comprising culturing such engineered microorganisms in the presence of a carbon source, under conditions wherein the hydrocarbon is produced, are further provided.

[0022] The hydrocarbon produced by the claimed methods may (a) be an alkane or an alkene, e.g., a C₁₃-C₂₁ alkane or alkene, (b) have a δ¹³C of −15.4 or greater, or (c) have a f_{M}¹⁴C of at least 1.003.

[0023] The hydrocarbon produced by the claimed methods may be used in a biofuel, for example, a diesel, gasoline, or jet fuel.

[0024] The invention further provides the use of microorganisms such as a yeast cell, a fungus cell, a filamentous fungi cell, or a bacterial cell in practicing the claimed methods.

### BRIEF DESCRIPTION OF THE FIGURES

[0025] FIG. 1A is a graphic representation of pathways for fatty alcohol production. FIG. 1B is a graphic representation of pathways for hydrocarbon production.

[0026] FIG. 2 includes a table listing exemplary homologs of E. coli K-12 MG 1655 ethanol-active dehydrogenase/acetaldehyde-active reductase AdhP [GenBank Accession No. NP_{—}415995.4].

[0027] FIG. 3 includes a table listing exemplary homologs of E. coli K-12 MG 1655 2,5-diketo-D-gluconate reductase A, DkgA [GenBank Accession No. NP_{—}417485.4].

[0028] FIG. 4 includes a table listing exemplary homologs of E. coli K-12 MG 1655 2,5-diketo-D-gluconate reductase B, DkgB [GenBank Accession No. NP_{—}414743.1].

[0029] FIG. 5 includes a table listing exemplary homologs of E. coli K-12 MG 1655 E. coli K-12 MG 1655 aldo-keto reductase Tas [GenBank Accession No. NP_{—}417311.1].

[0030] FIG. 6 includes a table listing exemplary homologs of E. coli K-12 MG 1655 Zn-dependent and NAD(P)-binding oxidoreductase RspB [GenBank Accession No. NP_{—}416097.1].

[0031] FIG. 7 includes a table listing exemplary homologs of E. coli K-12 MG 1655 Zn-dependent and NAD(P)-binding oxidoreductase YahK [GenBank Accession No. NP_{—}414859.1].

[0032] FIG. 8 includes a table listing exemplary homologs of E. coli K-12 MG 1655 NAD(P)-binding oxidoreductase YbbO [GenBank Accession No. NP_{—}415026.1].

[0033] FIG. 9 includes a table listing exemplary homologs of E. coli K-12 MG 1655 oxidoreductase YbdH [GenBank Accession No. NP_{—}415132.1].

[0034] FIG. 10 includes a table listing exemplary homologs of E. coli K-12 MG 1655 Zn-dependent and NAD(P)-binding oxidoreductase YbdR [GenBank Accession No. NP_{—}4155141.1].

[0035] FIG. 11 includes a table listing exemplary homologs of E. coli K-12 MG 1655 NAD(P)-binding oxidoreductase YgfF [GenBank Accession No. NP_{—}417378.1].

[0036] FIG. 12 includes a table listing exemplary homologs of E. coli K-12 MG 1655 Zn-dependent and NAD(P)-binding oxidoreductase YhdH [Genbank Accession No. NP_{—}417719.1].

[0037] FIG. 13 includes a table listing exemplary homologs of E. coli K-12 MG 1655 Zn-dependent and NAD(P)-binding alcohol dehydrogenase YjgB [GenBank Accession No. NP_{—}418690.4].

[0038] FIG. 14 includes a table listing exemplary homologs of E. coli K-12 MG 1655 3-dehroquinate synthase AroB [GenBank Accession No. NP_{—}417848.1].

[0039] FIG. 15 includes a table listing exemplary homologs of E. coli K-12 MG 1655 Zn-dependent and NAD(P)-binding oxidoreductase YcjQ [GenBank Accession No. NP_{—}415829.1].

[0040] FIG. 16 includes a table listing exemplary homologs of E. coli K-12 MG 1655 NAD(P)-binding oxidoreductase YdbC [GenBank Accession No. NP_{—}415924.1].

[0041] FIG. 17 includes a table listing exemplary homologs of E. coli K-12 MG 1655 NADH-dependent alpha-keto reductase YdjG [GenBank Accession No. NP_{—}416285.1].

[0042] FIG. 18 includes a table listing exemplary homologs of E. coli K-12 MG 1655 NADPH-dependent aldo-keto reductase YeaE [GenBank Accession No. NP_{—}416295.1].

[0043] FIG. 19 includes a table listing exemplary homologs of E. coli K-12 MG 1655 NADP-dependent, Zn-dependent oxidoreductase YncB [GenBank Accession No. NP_{—}415966.6].

[0044] FIG. 20 includes a table listing exemplary homologs of E. coli K-12 MG 1655 NAD(P)-dependent alcohol dehydrogenase YqhD [GenBank Accession No. NP_{—}417484.1].

[0045] FIG. 21 includes a table listing exemplary homologs of E. coli K-12 MG 1655 Zn-dependent and NAD(P)-binding oxidoreductase YdjL [GenBank Accession No. NP_{—}416290.1].

[0046] FIG. 22 includes tables listing E. coli dehydratase/isomerase enzymes and dehydratase/isomerase enzymes from other organisms.

[0047] FIG. 23 includes table listing E. coli keto-ACP synthase enzymes and keto-ACP synthase enzymes from other organisms.

[0048] FIG. 24A is a graphic representation of fatty alcohols produced by a recombinant E. coli strain transformed with pETDuet-1-'tesA-alrAadp1 and pACYCDuet-1-CarB. FIG. 24B is a GC/MS trace of fatty alcohol produced by a recombinant E. coli strain transformed with pETDuet-1-'tesA-alrAadp1 and pACYCDuet-1-CarB as compared to the control strain, which did not express an alrAadp1.

[0049] FIG. 25 is a graphic representation of fatty alcohols produced by a recombinant E. coli strain transformed with pETDuet-1-'tesA-yjgB and pACYCDuet-1-CarB.

[0050] FIG. 26A is a GC/MS trace of fatty alcohol production in MG1655 (DE3, ΔfadD)/pETDuet-1-tesA and pACYCDuet-1-CarB cells. FIG. 26B is a GC/MS trace of fatty alcohol production in MG1655 (DE3, ΔfadD, yjgB::kan)/pETDuet-1-tesA and pACYCDuet-1-CarB cells. FIG. 26C is a GC/MS trace of fatty alcohol production in MG1655 (DE3, ΔfadD, yjgB::kan)/pETDuet-1-'tesA-yjgB and pACYCDuet-1-CarB cells. The arrows in FIGS. 26A, 26B, and 26C indicate the absence of C12:0 fatty aldehydes.

[0051] FIG. 27 is a graphic representation of fatty alcohol production in various deletion mutants of E. coli.

[0052] FIG. 28 is a graphic representation of fatty alcohol production in various deletion mutants of E. coli.

[0053] FIGS. 29A-29X are graphs depicting of the amount of fatty aldehydes converted to fatty alcohol using the enzymatic assays as described in Example 5. The title of each graph indicates the co-factor and substrate that were used in the assay. “C12” indicates a dodecanal substrate. “C16:1” indicates a 11-cis-hexadecenal substrate. The tables accompanying the graphs indicate the percentages of fatty aldehydes that were converted into fatty alcohols at the marked concentrations, as measured by GC-FID. The tables also indicate the p-values for the samples' capacity to catalyze the conversion of fatty aldehydes to fatty alcohols.

### DETAILED DESCRIPTION OF THE INVENTION

[0054] Unless otherwise defined, all technical and scientific terms used herein have the same meaning as commonly understood by one of the ordinary skill in the art to which this invention belongs. Although methods and materials similar or equivalent to those described herein can be used in the practice or testing of the present invention, suitable methods and materials are described below. All publications, patent applications, patents, and other references mentioned herein, including GenBank database sequences, are incorporated by reference in their entirety. In case of conflict, the present specification, including definitions, will control. In addition, the materials, methods, and examples are illustrative only and not intended to be limiting.

[0055] Other features and advantages of the invention will be apparent from the following detailed description, and from the claims.

[0056] The invention is based, at least in part, on the discovery that altering the level of expression of one or more of a fatty alcohol biosynthetic polypeptide, a fatty aldehyde biosynthetic polypeptide, an acyl-ACP reductase polypeptide (EC 6.4.1.2) and a hydrocarbon biosynthetic polypeptide, e.g., a decarbonylase, in the microorganism host cell facilitates enhanced production of fatty acids and fatty acid derivatives by the microorganism.

### DEFINITIONS

[0057] Throughout the specification, a reference may be made using an abbreviated gene name or polypeptide name, but it is understood that such an abbreviated gene or polypeptide name represents the genus of genes or polypeptides. Such gene names include all genes encoding the same polypeptide and homologous polypeptides having the same physiological function. Polypeptide names include all polypeptides that have the same activity (e.g., that catalyze the same fundamental chemical reaction).

[0058] Unless otherwise indicated, the accession numbers referenced herein are derived from the NCBI database (National Center for Biotechnology Information) maintained by the National Institute of Health, U.S.A. Unless otherwise indicated, the accession numbers are as provided in the database as of October 2008.

[0059] EC numbers are established by the Nomenclature Committee of the International Union of Biochemistry and Molecular Biology (NC-IUBMB) (available at http://www.chem.qmul.ac.uldiubmb/enzyme/). The EC numbers referenced herein are derived from the KEGG Ligand database, maintained by the Kyoto Encyclopedia of Genes and Genomics, sponsored in part by the University of Tokyo. Unless otherwise indicated, the EC numbers are as provided in the database as of October 2008.

[0060] The articles “a” and “an” are used herein to refer to one or to more than one (i.e., to at least one) of the grammatical object of the article. By way of example, “an element” means one element or more than one element.

[0061] As used herein “acyl CoA” refers to an acyl thioester formed between the carbonyl carbon of alkyl chain and the sulfydryl group of the 4′-phosphopantethionyl moiety of coenzyme A (CoA), which has the formula R—C(O)S—CoA, where R is any alkyl group having at least 4 carbon atoms. In some instances an acyl CoA will be an intermediate in the synthesis of fully saturated acyl CoAs, including, but not limited to 3-keto-acyl CoA, a 3-hydroxy acyl CoA, a delta-2-trans-enoyl-CoA, or an alkyl acyl CoA. In some embodiments, the carbon chain will have about 5, 6, 7, 8, 9, 10, 11, 12, 13, 14, 15, 16, 17, 18, 19, 20, 21, 22, 23, 24, 25, or 26 carbons. In other embodiments the acyl CoA will be branched. In one embodiment the branched acyl CoA is an isoacyl CoA, in another it is an anti-isoacyl CoA. Each of these “acyl CoAs” are substrates for enzymes that convert them to fatty acid derivatives such as those described herein.

[0062] As used herein, the term “alcohol dehydrogenase” (EC1.1.1.*) is a peptide capable of catalyzing the conversion of a fatty aldehyde to an alcohol (e.g., fatty alcohol). Additionally, one of ordinary skill in the art will appreciate that some alcohol dehydrogenases will catalyze other reactions as well. For example, some alcohol dehydrogenases will accept other substrates in addition to fatty aldehydes. Such non-specific alcohol dehydrogenases are, therefore, also included in this definition. Nucleic acid sequences encoding alcohol dehydrogenases are known in the art, and such alcohol dehydrogenases are publicly available. Exemplary GenBank Accession Numbers include those provided in the figures.

[0063] As used herein, the term “aldehyde” means a hydrocarbon having the formula RCHO characterized by an unsaturated carbonyl group (C═O). In a preferred embodiment, the aldehyde is any aldehyde made from a fatty acid or fatty acid derivative. In one embodiment, the R group is at least about 1, 2, 3, 4, 5, 6, 7, 8, 9, 10, 11, 12, 13, 14, 15, 16, 17, 18, 19, or 20 carbons in length.

[0064] As used herein, an “aldehyde biosynthetic gene” or an “aldehyde biosynthetic polynucleotide” is a nucleic acid that encodes an aldehyde biosynthetic polypeptide.

[0065] As used herein, an “aldehyde biosynthetic polypeptide is a polypeptide that is a part of the biosynthetic pathway of an aldehyde. Such polypeptide can act on a biological substrate to yield an aldehyde. In some instances, the aldehyde biosynthetic polypeptide has reductase activity.

[0066] As used herein, the term “alkane” means saturated hydrocarbons or compounds that consist only of carbon (C) and hydrogen (H), wherein these atoms are linked together by single bonds (i.e., they are saturated compounds).

[0067] The terms “altered level of expression” and “modified level of expression” are used interchangeably and mean that a polynucleotide, polypeptide, or hydrocarbon is present in a different concentration in an engineered microorganism as compared to its concentration in a corresponding wild-type cell under the same conditions.

[0068] As used herein, the term “attenuate” means to weaken, reduce or diminish. For example, a polypeptide can be attenuated by modifying the polypeptide to reduce its activity (e.g., by modifying a nucleotide sequence that encodes the polypeptide).

[0069] In other embodiments, the polypeptide, polynucleotide, or hydrocarbon having an altered level of expression is “attenuated” or has a “decreased level of expression.” As used herein, “attenuate” and “decreasing the level of expression” mean to express or cause to be expressed a polynucleotide, polypeptide, or hydrocarbon in a cell at a lesser concentration than is normally expressed in a corresponding wild-type cell under the same conditions. The degree of overexpression or attenuation can be 1.5-fold or more, e.g., 2-fold or more, 3-fold or more, 5-fold or more, 10-fold or more, or 15-fold or more. Alternatively, or in addition, the degree of overexpression or attenuation can be 500-fold or less, e.g., 100-fold or less, 50-fold or less, 25-fold or less, or 20-fold or less. Thus, the degree of overexpression or attenuation can be bounded by any two of the above endpoints. For example, the degree of overexpression or attenuation can be 1.5-500-fold, 2-50-fold, 10-25-fold, or 15-20-fold.

[0070] As used herein, the term “biodiesel” means a biofuel that can be a substitute of diesel, which is derived from petroleum. Biodiesel can be used in internal combustion diesel engines in either a pure form, which is referred to as “neat” biodiesel, or as a mixture in any concentration with petroleum-based diesel. Biodiesel can include esters or hydrocarbons, such as alcohols.

[0071] As used therein, the term “biofuel” refers to any fuel derived from biomass. Biofuels can be substituted for petroleum based fuels. For example, biofuels are inclusive of transportation fuels (e.g., gasoline, diesel, jet fuel, etc.), heating fuels, and electricity-generating fuels. Biofuels are a renewable energy source.

[0072] As used herein, the term “biomass” refers to any biological material from which a carbon source is derived. In some embodiments, a biomass is processed into a carbon source, which is suitable for bioconversion. In other embodiments, the biomass does not require further processing into a carbon source. The carbon source can be converted into a biofuel. An exemplary source of biomass is plant matter or vegetation, such as corn, sugar cane, or switchgrass. Another exemplary source of biomass is metabolic waste products, such as animal matter (e.g., cow manure). Further exemplary sources of biomass include algae and other marine plants. Biomass also includes waste products from industry, agriculture, forestry, and households, including, but not limited to, fermentation waste, ensilage, straw, lumber, sewage, garbage, cellulosic urban waste, and food leftovers. The term “biomass” also can refer to sources of carbon, such as carbohydrates (e.g., monosaccharides, disaccharides, or polysaccharides).

[0073] “Branched chains” may have more than one point of branching and may include cyclic branches. In some embodiments, the branched fatty acid, branched fatty aldehyde, or branched fatty alcohol comprises a C₆, C₇, C₈, C₉, C₁₀, C₁₁, C₁₂, C₁₃, C₁₄, C₁₅, C₁₆, C₁₇, C₁₈, C₁₉, C₂₀, C₂₁, C₂₂, C₂₃, C₂₄, C₂₅, or a C₂₋₆ branched fatty acid, branched fatty aldehyde, or branched fatty alcohol. In particular embodiments, the branched fatty acid, branched fatty aldehyde, or branched fatty alcohol is a C₆, C₈, C₁₀, C₁₂, C₁₃, C₁₄, C₁₅, C₁₆, C₁₇, or C₁₋₈ branched fatty acid, branched fatty aldehyde, or branched fatty alcohol. In certain embodiments, the hydroxyl group of the branched fatty acid, branched fatty aldehyde, or branched fatty alcohol is in the primary (C₁) position. In certain embodiments, the branched fatty acid, branched fatty aldehyde, or branched fatty alcohol is an iso-fatty acid, iso-fatty aldehyde, or iso-fatty alcohol, or an antesio-fatty acid, an anteiso-fatty aldehyde, or anteiso-fatty alcohol. In exemplary embodiments, the branched fatty acid, branched fatty aldehyde, or branched fatty alcohol is selected from iso-C_{7:0}, iso-C_{8:0}, iso-C_{9:0}, iso-C_{10:0}, iso-C_{12:0}, iso-C_{13:0}, iso-C_{14:0}, iso-C_{15:0}, iso-C_{16:0}, iso-C_{17:0}, iso-C_{18:0}, iso-C_{19:0}, anteiso-C_{7:0}, anteiso-C_{8:0}, anteiso-C_{9:0}, anteiso-C_{10:0}, anteiso-C_{11:0}, anteiso-C_{12:0}, anteiso-C_{13:0}, anteiso-C_{14:0}, anteiso-C_{15:0}, anteiso-C_{16:0}, anteiso-C_{17:0}, anteiso-C_{18:0}, and anteiso-C_{19:0} branched fatty acid, branched fatty aldehyde or branched fatty alcohol.

[0074] As used herein, the phrase “carbon source” refers to a substrate or compound suitable to be used as a source of carbon for prokaryotic or simple eukaryotic cell growth. Carbon sources can be in various forms, including, but not limited to polymers, carbohydrates, acids, alcohols, aldehydes, ketones, amino acids, peptides, and gases (e.g., CO and CO₂). Exemplary carbon sources include, but are not limited to, monosaccharides, such as glucose, fructose, mannose, galactose, xylose, and arabinose; oligosaccharides, such as fructo-oligosaccharide and galacto-oligosaccharide; polysaccharides such as starch, cellulose, pectin, and xylan; disaccharides, such as sucrose, maltose, and turanose; cellulosic material and variants such as methyl cellulose and sodium carboxymethyl cellulose; saturated or unsaturated fatty acid esters, succinate, lactate, and acetate; alcohols, such as ethanol, methanol, and glycerol, or mixtures thereof. The carbon source can also be a product of photosynthesis, such as glucose. In certain preferred embodiments, the carbon source is biomass. In other preferred embodiments, the carbon source is glucose.

[0075] As used herein, a “cloud point lowering additive” is an additive added to a composition to decrease or lower the cloud point of a solution.

[0076] As used herein, the phrase “cloud point of a fluid” means the temperature at which dissolved solids are no longer completely soluble. Below this temperature, solids begin precipitating as a second phase giving the fluid a cloudy appearance. In the petroleum industry, cloud point refers to the temperature below which a solidified material or other heavy hydrocarbon crystallizes in a crude oil, refined oil, or fuel to form a cloudy appearance. The presence of solidified materials influences the flowing behavior of the fluid, the tendency of the fluid to clog fuel filters, injectors, etc., the accumulation of solidified materials on cold surfaces (e.g., a pipeline or heat exchanger fouling), and the emulsion characteristics of the fluid with water.

[0077] A nucleotide sequence is “complementary” to another nucleotide sequence if each of the bases of the two sequences matches (i.e., is capable of forming Watson Crick base pairs). The term “complementary strand” is used herein interchangeably with the term “complement”. The complement of a nucleic acid strand can be the complement of a coding strand or the complement of a non-coding strand.

[0078] As used herein, the term “conditions sufficient to allow expression” means any conditions that allow a microorganism host cell to produce a desired product, such as a polypeptide or fatty aldehyde described herein. Suitable conditions include, for example, fermentation conditions. Fermentation conditions can comprise many parameters, such as temperature ranges, levels of aeration, and media composition. Each of these conditions, individually and in combination, allows the host cell to grow. Exemplary culture media include broths or gels. Generally, the medium includes a carbon source, such as glucose, fructose, cellulose, or the like, that can be metabolized by a host cell directly. In addition, enzymes can be used in the medium to facilitate the mobilization (e.g., the depolymerization of starch or cellulose to fermentable sugars) and subsequent metabolism of the carbon source. To determine if conditions are sufficient to allow expression, a host cell can be cultured, for example, for about 4, 8, 12, 24, 36, or 48 hours. During and/or after culturing, samples can be obtained and analyzed to determine if the conditions allow expression. For example, the host cells in the sample or the medium in which the host cells were grown can be tested for the presence of a desired product. When testing for the presence of a product, assays, such as, but not limited to, TLC, HPLC, GC/FID, GC/MS, LC/MS, MS, can be used.

[0079] As used herein, “control element” means a transcriptional control element. Control elements include promoters and enhancers. The term “promoter element,” “promoter,” or “promoter sequence” refers to a DNA sequence that functions as a switch that activates the expression of a gene. If the gene is activated, it is said to be transcribed or participating in transcription. Transcription involves the synthesis of mRNA from the gene. A promoter, therefore, serves as a transcriptional regulatory element and also provides a site for initiation of transcription of the gene into mRNA. Control elements interact specifically with cellular proteins involved in transcription (Maniatis et al., Science 236:1237, 1987).

[0080] As used herein, the term “fatty acid” means a carboxylic acid having the formula RCOOH. R represents an aliphatic group, preferably an alkyl group. R can comprise between about 4 and about 22 carbon atoms. Fatty acids can be saturated, monounsaturated, or polyunsaturated. In a preferred embodiment, the fatty acid is made from a fatty acid biosynthetic pathway.

[0081] As used herein, the term “fatty acid biosynthetic pathway” means a biosynthetic pathway that produces fatty acids. The fatty acid biosynthetic pathway includes fatty acid synthases that can be engineered, as described herein, to produce fatty acids, and in some embodiments can be expressed with additional enzymes to produce fatty acids having desired carbon chain characteristics.

[0082] As used herein, the term “fatty acid degradation enzyme” means an enzyme involved in the breakdown or conversion of a fatty acid or fatty acid derivative into another product. A nonlimiting example of a fatty acid degradation enzyme is an acyl-CoA synthase (EC 2.3.1.86). Additional examples of fatty acid degradation enzymes are described herein.

[0083] As used herein, the term “fatty acid derivative” means products made in part from the fatty acid biosynthetic pathway of the production host organism. “Fatty acid derivative” also includes products made in part from acyl-ACP or acyl-ACP derivatives. The fatty acid biosynthetic pathway includes fatty acid synthase enzymes which can be engineered as described herein to produce fatty acid derivatives, and in some examples can be expressed with additional enzymes to produce fatty acid derivatives having desired carbon chain characteristics. Exemplary fatty acid derivatives include for example, fatty acids, acyl-CoA, fatty aldehyde, short and long chain alcohols, hydrocarbons, fatty alcohols, and esters (e.g., waxes, fatty acid esters, or fatty esters).

[0084] As used herein, the term “fatty acid derivative enzyme” means any enzyme that may be expressed or overexpressed in the production of fatty acid derivatives. These enzymes may be part of the fatty acid biosynthetic pathway. Non-limiting examples of fatty acid derivative enzymes include fatty acid synthases, thioesterases (EC 3.1. 2.14 or EC 3.1.1.5), acyl-CoA synthases (EC 2.3.1.86), acyl-CoA reductases, alcohol dehydrogenases, alcohol acyltransferases, fatty alcohol-forming acyl-CoA reductases, fatty acid (carboxylic acid) reductases, acyl-ACP reductases (EC 6.4.1.2), fatty acid hydroxylases, acyl-CoA desaturases, acyl-ACP desaturases, acyl-CoA oxidases, acyl-CoA dehydrogenases, ester synthases, and alkane biosynthetic polypeptides, etc. Fatty acid derivative enzymes can convert a substrate into a fatty acid derivative. In some examples, the substrate may be a fatty acid derivative that the fatty acid derivative enzyme converts into a different fatty acid derivative. Exemplary suitable substrates include, C₆-C₂₆ fatty aldehydes.

[0085] As used herein, “fatty acid enzyme” means any enzyme involved in fatty acid biosynthesis. Fatty acid enzymes can be modified in host cells to produce fatty acids. Non-limiting examples of fatty acid enzymes include fatty acid synthases and thioesterases (EC 3.1. 2.14 or EC 3.1.1.5). Additional examples of fatty acid enzymes are described herein.

[0086] As used herein, the term “fatty acid or derivative thereof” means a “fatty acid” or a “fatty acid derivative.” The term “fatty acid” means a carboxylic acid having the formula RCOOH. R represents an aliphatic group, preferably an alkyl group. R can comprise between about 4 and about 22 carbon atoms. Fatty acids can be saturated, monounsaturated, or polyunsaturated. In a preferred embodiment, the fatty acid is made from a fatty acid biosynthetic pathway.

[0087] As used herein, “fatty alcohol” means an alcohol having the formula ROH. In some embodiments, the fatty alcohol is any alcohol made from a fatty acid or fatty acid derivative. In certain embodiments, the R group of a fatty acid, fatty aldehyde, or fatty alcohol is at least 5, at least 6, at least 7, at least 8, at least 9, at least 10, at least 11, at least 12, at least 13, at least 14, at least 15, at least 16, at least 17, at least 18, or at least 19, carbons in length. Alternatively, or in addition, the R group is 20 or less, 19 or less, 18 or less, 17 or less, 16 or less, 15 or less, 14 or less, 13 or less, 12 or less, 11 or less, 10 or less, 9 or less, 8 or less, 7 or less, or 6 or less carbons in length. Thus, the R group can have an R group bounded by any two of the above endpoints. For example, the R group can be 6-16 carbons in length, 10-14 carbons in length, or 12-18 carbons in length. In some embodiments, the fatty acid, fatty aldehyde, or fatty alcohol is a C6, C7, C8, C9, C10, C11, C12, C13, C14, C15, C16, C17, C18, C19, C20, C21, C22, C23, C24, C25, or a C26 fatty acid, fatty aldehyde, or fatty alcohol. In certain embodiments, the fatty acid, fatty aldehyde, or fatty alcohol is a C6, C8, C10, C12, C13, C14, C15, C16, C17, or C18 fatty acid, fatty aldehyde, or fatty alcohol. The R group of a fatty acid, fatty aldehyde, or fatty alcohol can be a straight chain or a branched chain.

[0088] As used herein, “fatty aldehyde” means an aldehyde having the formula RCHO characterized by an unsaturated carbonyl group (C═O). In a preferred embodiment, the fatty aldehyde is any aldehyde made from a fatty acid or fatty acid derivative. In one embodiment, the R group is at least about 1, 2, 3, 4, 5, 6, 7, 8, 9, 10, 11, 12, 13, 14, 15, 16, 17, 18, 19, or 20 carbons in length. R can be straight or branched chain. The branched chains may have one or more points of branching. In addition, the branched chains may include cyclic branches. Furthermore, R can be saturated or unsaturated. If unsaturated, the R can have one or more points of unsaturation. In one embodiment, the fatty aldehyde is produced biosynthetically. Fatty aldehydes have many uses. For example, fatty aldehydes can be used to produce many specialty chemicals. For example, fatty aldehydes are used to produce polymers, resins, dyes, flavorings, plasticizers, perfumes, pharmaceuticals, and other chemicals. Some are used as solvents, preservatives, or disinfectants. Some natural and synthetic compounds, such as vitamins and hormones, are aldehydes.

[0089] As used herein, the term “fatty ester” may be used in reference to an ester. In a preferred embodiment, a fatty ester is any ester made from a fatty acid, for example a fatty acid ester. In some embodiments, a fatty ester contains an A side and a B side. As used herein, an “A side” of an ester refers to the carbon chain attached to the carboxylate oxygen of the ester. As used herein, a “B side” of an ester refers to the carbon chain comprising the parent carboxylate of the ester. In embodiments where the fatty ester is derived from the fatty acid biosynthetic pathway, the A side is contributed by an alcohol, and the B side is contributed by a fatty acid. Any alcohol can be used to form the A side of the fatty esters. For example, the alcohol can be derived from the fatty acid biosynthetic pathway. Alternatively, the alcohol can be produced through non-fatty acid biosynthetic pathways. Moreover, the alcohol can be provided exogenously. For example, the alcohol can be supplied in the fermentation broth in instances where the fatty ester is produced by an organism. Alternatively, a carboxylic acid, such as a fatty acid or acetic acid, can be supplied exogenously in instances where the fatty ester is produced by an organism that can also produce alcohol. The carbon chains comprising the A side or B side can be of any length. In one embodiment, the A side of the ester is at least about 1, 2, 3, 4, 5, 6, 7, 8, 10, 12, 14, 16, or 18 carbons in length. When the fatty ester is a fatty acid methyl ester, the A side of the ester is 1 carbon in length. When the fatty ester is a fatty acid ethyl ester, the A side of the ester is 2 carbons in length. The B side of the ester can be at least about 4, 6, 8, 10, 12, 14, 16, 18, 20, 22, 24, or 26 carbons in length. The A side and/or the B side can be straight or branched chain. The branched chains can have one or more points of branching. In addition, the branched chains can include cyclic branches. Furthermore, the A side and/or B side can be saturated or unsaturated. If unsaturated, the A side and/or B side can have one or more points of unsaturation. In some embodiments, the fatty acid ester is a fatty acid methyl ester (FAME) or a fatty acid ethyl ester (FAEE). In certain embodiments, the FAME is a beta-hydroxy (B—OH) FAME. In one embodiment, the fatty ester is a wax. The wax can be derived from a long chain alcohol and a long chain fatty acid. In another embodiment, the fatty ester is a fatty acid thioester, for example fatty acyl Coenzyme A (CoA). In other embodiments, the fatty ester is a fatty acyl pantothenate, an acyl carrier protein (ACP), or a fatty phosphate ester.

[0090] As used herein, “fraction of modern carbon” or “f_{M}” has the same meaning as defined by National Institute of Standards and Technology (NIST) Standard Reference Materials (SRMs) 4990B and 4990C, known as oxalic acids standards HOxI and HOxII, respectively. The fundamental definition relates to 0.95 times the ¹⁴C/¹²C isotope ratio HOxI (referenced to AD 1950). This is roughly equivalent to decay-corrected pre-Industrial Revolution wood. For the current living biosphere (plant material), f_{M} is approximately 1.1.

[0091] “Gene knockout”, as used herein, refers to a procedure by which a gene encoding a target protein is modified or inactivated so to reduce or eliminate the function of the intact protein. Inactivation of the gene may be performed by general methods such as mutagenesis by UV irradiation or treatment with N-methyl-N′-nitro-N-nitrosoguanidine, site-directed mutagenesis, homologous recombination, insertion-deletion mutagenesis, or “Red-driven integration” (Datsenko et al., Proc. Natl. Acad. Sci. USA, 97:6640-45, 2000). For example, in one embodiment, a construct is introduced into a host cell, such that it is possible to select for homologous recombination events in the host cell. One of skill in the art can readily design a knock-out construct including both positive and negative selection genes for efficiently selecting transfected cells that undergo a homologous recombination event with the construct. The alteration in the host cell may be obtained, for example, by replacing through a single or double crossover recombination a wild type DNA sequence by a DNA sequence containing the alteration. For convenient selection of transformants, the alteration may, for example, be a DNA sequence encoding an antibiotic resistance marker or a gene complementing a possible auxotrophy of the host cell. Mutations include, but are not limited to, deletion-insertion mutations. An example of such an alteration includes a gene disruption, i.e., a perturbation of a gene such that the product that is normally produced from this gene is not produced in a functional form. This could be due to a complete deletion, a deletion and insertion of a selective marker, an insertion of a selective marker, a frameshift mutation, an in-frame deletion, or a point mutation that leads to premature termination. In some instances, the entire mRNA for the gene is absent. In other situations, the amount of mRNA produced varies.

[0092] As used herein, a “host cell” is a cell used to produce a product described herein (e.g., a fatty alcohol described herein). A host cell can be modified to express or overexpress selected genes or to have attenuated expression of selected genes. Non-limiting examples of host cells include plant, animal, human, bacteria, yeast, or filamentous fungi cells.

[0093] In some embodiments, a polypeptide described herein has “increased level of activity.” By “increased level of activity” is meant that a polypeptide has a higher level of biochemical or biological function (e.g., DNA binding or enzymatic activity) in an engineered host cell as compared to its level of biochemical and/or biological function in a corresponding wild-type host cell under the same conditions. The degree of enhanced activity can be about 10% or more, about 20% or more, about 50% or more, about 75% or more, about 100% or more, about 200% or more, about 500% or more, about 1000% or more, or any range therein.

[0094] The term “isolated” as used herein with respect to nucleic acids, such as DNA or RNA, refers to molecules separated from other DNAs or RNAs, respectively that are present in the natural source of the nucleic acid. Moreover, by an “isolated nucleic acid” is meant to include nucleic acid fragments, which are not naturally occurring as fragments and would not be found in the natural state. The term “isolated” is also used herein to refer to polypeptides, which are isolated from other cellular proteins and is meant to encompass both purified and recombinant polypeptides. The term “isolated” as used herein also refers to a nucleic acid or peptide that is substantially free of cellular material, viral material, or culture medium when produced by recombinant DNA techniques. The term “isolated” as used herein also refers to a nucleic acid or peptide that is substantially free of chemical precursors or other chemicals when chemically synthesized. The teen “isolated”, as used herein with respect to products, such as fatty alcohols, refers to products that are isolated from cellular components, cell culture media, or chemical or synthetic precursors.

[0095] As used herein, the “level of expression of a gene” refers to the level of mRNA, pre-mRNA nascent transcript(s), transcript processing intermediates, mature mRNA(s), and degradation products encoded by the gene.

[0096] As used herein, the term “microorganism” means prokaryotic and eukaryotic microbial species from the domains Archaea, Bacteria and Eucarya, the latter including yeast and filamentous fungi, protozoa, algae, or higher Protista. The terms “microbial cells” (i.e., cells from microbes) and “microbes” are used interchangeably and refer to cells or small organisms that can only be seen with the aid of a microscope.

[0097] As used herein, the term “nucleic acid” refers to polynucleotides, such as deoxyribonucleic acid (DNA), and, where appropriate, ribonucleic acid (RNA). The term should also be understood to include, as equivalents, analogs of RNAs or DNAs made from nucleotide analogs, and, as applicable to the embodiment being described, single (sense or antisense) and double-stranded polynucleotides, ESTs, chromosomes, cDNAs, mRNAs, and rRNAs.

[0098] The term “nucleotide” as used herein refers to a monomeric unit of a polynucleotide that consists of a heterocyclic base, a sugar, and one or more phosphate groups. The naturally occurring bases (guanine, (G), adenine, (A), cytosine, (C), thymine, (T), and uracil (U)) are typically derivatives of purine or pyrimidine, though it should be understood that naturally and non-naturally occurring base analogs are also included. The naturally occurring sugar is the pentose (five-carbon sugar) deoxyribose (which forms DNA) or ribose (which forms RNA), though it should be understood that naturally and non-naturally occurring sugar analogs are also included. Nucleic acids are typically linked via phosphate bonds to form nucleic acids or polynucleotides, though many other linkages are known in the art (e.g., phosphorothioates, boranophosphates, and the like). Polynucleotides described herein may comprise degenerate nucleotides which are defined according to the IUPAC code for nucleotide degeneracy wherein B is C, G, or T; D is A, G, or T; H is A, C, or T; K is G or T; M is A or C; N is A, C, G, or T; R is A or G; S is C or G; V is A, C, or G; W is A or T; and Y is C or T.

[0099] The terms “olefin” and “alkene” are used interchangeably herein, and refer to hydrocarbons containing at least one carbon-to-carbon double bond (i.e., they are unsaturated compounds).

[0100] As used herein, the teim “operably linked” means that selected nucleotide sequence (e.g., encoding a polypeptide described herein) is in proximity with a promoter to allow the promoter to regulate expression of the selected DNA. In addition, the promoter is located upstream of the selected nucleotide sequence in terms of the direction of transcription and translation. By “operably linked” is meant that a nucleotide sequence and a regulatory sequence(s) are connected in such a way as to permit gene expression when the appropriate molecules (e.g., transcriptional activator proteins) are bound to the regulatory sequence(s).

[0101] The term “or” is used herein to mean, and is used interchangeably with, the term “and/or,” unless context clearly indicates otherwise.

[0102] In some embodiments, the polypeptide, polynucleotide, or hydrocarbon having an altered or modified level of expression is “overexpressed” or has an “increased level of expression.” As used herein, “overexpress” and “increasing the level of expression” mean to express or cause to be expressed a polynucleotide, polypeptide, or hydrocarbon in a cell at a greater concentration than is noiinally expressed in a corresponding wild-type cell under the same conditions. For example, a polypeptide can be “overexpressed” in an engineered host cell when the polypeptide is present in a greater concentration in the engineered host cell as compared to its concentration in a non-engineered host cell of the same species under the same conditions.

[0103] As used herein, “partition coefficient” or “P,” is defined as the equilibrium concentration of a compound in an organic phase divided by the concentration at equilibrium in an aqueous phase (e.g., fermentation broth). In one embodiment of a bi-phasic system described herein, the organic phase is formed by the fatty aldehyde during the production process. However, in some examples, an organic phase can be provided, such as by providing a layer of octane, to facilitate product separation. When describing a two phase system, the partition characteristics of a compound can be described as logP. For example, a compound with a logP of 1 would partition 10:1 to the organic phase. A compound with a logP of −1 would partition 1:10 to the organic phase. By choosing an appropriate fermentation broth and organic phase, a fatty aldehyde with a high logP value can separate into the organic phase even at very low concentrations in the fermentation vessel.

[0104] “Polynucleotide” refers to a polymer of DNA or RNA, which can be single-stranded or double-stranded and which can contain non-natural or altered nucleotides. The terms “polynucleotide,” “nucleic acid,” and “nucleic acid molecule” are used herein interchangeably to refer to a polymeric form of nucleotides of any length, either ribonucleotides (RNA) or deoxyribonucleotides (DNA). These terms refer to the primary structure of the molecule, and thus include double- and single-stranded DNA, and double- and single-stranded RNA. The terms include, as equivalents, analogs of either RNA or DNA made from nucleotide analogs and modified polynucleotides such as, though not limited to methylated and/or capped polynucleotides. The polynucleotide can be in any form, including but not limited to plasmid, viral, chromosomal, EST, cDNA, mRNA, and rRNA.

[0105] The terms “polypeptide” and “protein” refer to a polymer of amino acid residues. The term “recombinant polypeptide” refers to a polypeptide that is produced by recombinant DNA techniques, wherein generally DNA encoding the expressed protein or RNA is inserted into a suitable expression vector that is in turn used to transform a host cell to produce the polypeptide or RNA.

[0106] As used herein, the term “purify,” “purified,” or “purification” means the removal or isolation of a molecule from its environment by, for example, isolation or separation. “Substantially purified” molecules are at least about 60% free, preferably at least about 75% free, and more preferably at least about 90% free from other components with which they are associated. As used herein, these terms also refer to the removal of contaminants from a sample. For example, the removal of contaminants can result in an increase in the percentage of fatty alcohol in a sample. For example, when fatty alcohols are produced in a host cell, the fatty alcohols can be purified by the removal of host cell proteins. After purification, the percentage of fatty alcohols in the sample is increased. The terms “purify,” “purified,” and “purification” do not require absolute purity. They are relative terms. Thus, for example, when fatty alcohols are produced in host cells, a purified fatty alcohol is one that is substantially separated from other cellular components (e.g., nucleic acids, polypeptides, lipids, carbohydrates, or other hydrocarbons). In another example, a purified fatty alcohol preparation is one in which the fatty alcohol is substantially free from contaminants, such as those that might be present following fermentation. In some embodiments, a fatty alcohol is purified when at least about 50% by weight of a sample is composed of the fatty alcohol. In other embodiments, a fatty alcohol is purified when at least about 60%, 70%, 80%, 85%, 90%, 92%, 95%, 98%, or 99% or more by weight of a sample is composed of the fatty alcohol.

[0107] As used herein, the term “recombinant polypeptide” refers to a polypeptide that is produced by recombinant DNA techniques, wherein generally DNA encoding the expressed protein or RNA is inserted into a suitable expression vector and that is in turn used to transform a host cell to produce the polypeptide or RNA.

[0108] The R group of a branched or unbranched fatty acid, branched or unbranched fatty aldehyde, or branched or unbranched fatty alcohol can be “saturated” or “unsaturated”. If unsaturated, the R group can have one or more than one point of unsaturation. In some embodiments, the unsaturated fatty acid, unsaturated fatty aldehyde, or unsaturated fatty alcohol is a monounsaturated fatty acid, monounsaturated fatty aldehyde, or monounsaturated fatty alcohol. In certain embodiments, the unsaturated fatty acid, unsaturated fatty aldehyde, or unsaturated fatty alcohol is a C6:1, C7:1, C8:1, C9:1, C10:1, C11:1, C12:1, C13:1, C14:1, C15:1, C16:1, C17:1, C18:1, C19:1, C20:1, C21:1, C22:1, C23:1, C24:1, C25:1, or a C26:1 unsaturated fatty acid, unsaturated fatty aldehyde, or unsaturated fatty alcohol. In certain preferred embodiments, the unsaturated fatty acid, unsaturated fatty aldehyde, or unsaturated fatty alcohol is C10:1, C12:1, C14:1, C16:1, or C18:1. In yet other embodiments, the unsaturated fatty acid, unsaturated fatty aldehyde, or unsaturated fatty alcohol is unsaturated at the omega-7 position. In certain embodiments, the unsaturated fatty acid, unsaturated fatty aldehyde, or unsaturated fatty alcohol comprises a cis double bond.

[0109] As used herein, the term “substantially identical” (or “substantially homologous”) is used to refer to a first amino acid or nucleotide sequence that contains a sufficient number of identical or equivalent (e.g., with a similar side chain, e.g., conserved amino acid substitutions) amino acid residues or nucleotides to a second amino acid or nucleotide sequence such that the first and second amino acid or nucleotide sequences have similar activities.

[0110] As used herein, the term “synthase” means an enzyme which catalyzes a synthesis process. As used herein, the term synthase includes synthases, synthetases, and ligases.

[0111] The terms “terminal olefin,” “α-olefin”, “terminal alkene” and “1-alkene” are used interchangeably herein with reference to α-olefins or alkenes with a chemical formula CₓH2ₓ, distinguished from other olefins with a similar molecular formula by linearity of the hydrocarbon chain and the position of the double bond at the primary or alpha position.

[0112] As used herein, the term “transfection” means the introduction of a nucleic acid (e.g., via an expression vector) into a recipient cell by nucleic acid-mediated gene transfer.

[0113] As used herein, “transformation” refers to a process in which a cell's genotype is changed as a result of the cellular uptake of exogenous DNA or RNA. This may result in the transformed cell expressing a recombinant form of an RNA or polypeptide. In the case of antisense expression from the transferred gene, the expression of a naturally-occurring form of the polypeptide is disrupted.

[0114] As used herein, a “transport protein” is a polypeptide that facilitates the movement of one or more compounds in and/or out of a cellular organelle and/or a cell.

[0115] As used herein, the term “vector” refers to a nucleic acid molecule capable of transporting another nucleic acid to which it has been linked. One type of useful vector is an episome (i.e., a nucleic acid capable of extra-chromosomal replication). Useful vectors are those capable of autonomous replication and/or expression of nucleic acids to which they are linked. Vectors capable of directing the expression of genes to which they are operatively linked are referred to herein as “expression vectors”. In general, expression vectors of utility in recombinant DNA techniques are often in the form of “plasmids,” which refer generally to circular double stranded DNA loops that, in their vector form, are not bound to the chromosome. In the present specification, “plasmid” and “vector” are used interchangeably, as the plasmid is the most commonly used form of vector. However, also included are such other forms of expression vectors that serve equivalent functions and that become known in the art subsequently hereto.

### DESCRIPTION OF EXEMPLARY EMBODIMENTS

### Production of Fatty Alcohols

[0116] The invention is based, at least in part, on the identification of a number of fatty alcohol biosynthetic enzymes or polypeptides that are capable of catalyzing the conversion of a fatty aldehyde to a fatty alcohol under suitable conditions, for example, in the presence of suitable substrates and/or co-factors. The fatty alcohols can be produced by one or more or all of the fatty alcohol biosynthesis pathways in E. coli that utilize, in part, genes that encode fatty aldehyde biosynthetic polypeptides, acyl-ACP reductases (EC 6.4.1.2), or the fatty alcohol biosynthetic enzymes of the present invention. In certain embodiments, the fatty alcohols are produced by a biosynthetic pathway depicted in FIG. 1A In this pathway, a fatty acid is first activated by ATP and then reduced to generate a fatty aldehyde. The fatty aldehyde can then be further reduced into a fatty alcohol by a fatty alcohol biosynthetic polypeptide of the present invention, such as, for example, a fatty aldehyde reductase, an alcohol dehydrogenase, an oxidoreductase, an aldo-keto reductase, or a short-chain dehydrogenase. In certain other embodiments, the fatty alcohols are produced by an alternative biosynthesis pathway depicted in FIG. 1A. In this pathway, an acyl-ACP is converted into a fatty aldehyde catalyzed by an acyl-ACP reductase (EC 6.4.1.2). The fatty aldehyde is further reduced into a fatty alcohol by a fatty alcohol biosynthetic polypeptide of the present invention, for example, by a fatty aldehyde reductase, an alcohol dehydrogenase, an oxidoreductase, an aldo-keto reductase, or a short-chain dehydrogenase. Exemplary embodiments of fatty alcohol biosynthetic enzymes of the present invention includes, without limitation, adhP, dkgA, dkgB, rspB, yahK, ybbO, ybdH, ybdR, ygfF, yhdH, yjgB, aroB, ycjQ, ydbC, ydjG, yeaE, yncB, yghD, ydjL, Tas, among others. Suitable substrates of these enzymes include fatty aldehydes, for example fatty aldehydes with carbon chain lengths from C₁₀ to C₁₈. Suitable co-factors include, without limitation, NAD, NAD(P), NADH, or NADPH.

[0117] The methods described herein can be used to produce fatty alcohols in an engineered microorganism by conversion of fatty aldehydes into fatty alcohols. In some instances, the fatty alcohol is produced by a fatty alcohol biosynthetic polypeptide having an amino acid sequence listed provided herein, as well as polypeptide variant thereof.

[0118] In other instances, the methods described herein can be used to produce fatty alcohols in an engineered microorganism using an acyl-ACP reductase polypeptide having an amino acid sequence provided herein, as well as a polypeptide variant thereof. In some instances, an acyl-ACP reductase polypeptide is one that includes one or more of the amino acid motifs disclosed herein. For example, the polypeptide can comprise one or more of SEQ ID NO:155, 156, 157, 158, 159, 160, 161, 162, 163, 164, or 165.

### Fatty Alcohol Biosynthetic Genes and Polypeptides.

[0119] In some instances, a fatty alcohol is produced by expressing a gene encoding a fatty alcohol biosynthetic polypeptide that is capable of catalyzing the enzymatic conversion of a fatty aldehyde to a fatty alcohol.

[0120] In some embodiments, the method further includes isolating the fatty alcohol from the host cell. In some embodiments, the fatty alcohol is present in the extracellular environment. In certain embodiments, the fatty alcohol is isolated from the extracellular environment. In certain embodiments, the fatty alcohol is spontaneously secreted, partially or completely, from the host cell. In alternative embodiments, the fatty alcohol is transported into the extracellular environment. In other embodiments, the fatty alcohol is passively transported into the extracellular environment. In some embodiments, the method further includes purifying the fatty alcohol.

[0121] In some embodiments, the fatty alcohol biosynthetic polypeptide is about 200 amino acids to about 800 amino acids in length. In certain embodiments, the polypeptide is about 250 amino acids to about 700 amino acids in length, for example, is about 300 to about 600 amino acids in length, about 350 to about 500 amino acids in length, or about 350 to about 450 amino acids in length. In other embodiments, the fatty alcohol biosynthetic polypeptide is up to about 800 amino acids in length, for example, up to about 700 amino acids in length, about 600 amino acids in length, about 500 amino acids in length, about 450 amino acids in length, about 400 amino acids in length, about 350 amino acids in length, about 300 amino acids in length, about 250 amino acids in length, or about 200 amino acids in length. In other embodiments, the fatty alcohol biosynthetic polypeptide is more than about 200 amino acids in length, for example, more than about 250 amino acids in length, about 300 amino acids in length, about 350 amino acids in length, about 400 amino acids in length, about 450 amino acids in length, about 500 amino acids in length, about 600 amino acids in length, about 700 amino acids in length, or about 800 amino acids in length.

[0122] In some embodiments, the fatty alcohol biosynthetic polypeptide comprises the amino acid sequence of SEQ ID NO: 1, 3, 5, 7, 9, 11, 13, 15, 17, 19, 21, 23, 25, 27, 29, 31, 33, 35, 37, or 39, with one or more amino acid substitutions, additions, insertions, or deletions, wherein the polypeptide is capable of catalyzing the enzymatic conversion of a fatty aldehyde to a fatty alcohol under suitable conditions, for example, in the presence of suitable substrates and/or co-factors. In certain embodiments, the polypeptide is capable of catalyzing the enzymatic conversion of a fatty aldehyde into a fatty alcohol under suitable conditions, for example, in the presence of suitable substrates and/or co-factors. In certain embodiments, the polypeptide is a fatty aldehyde reductase and/or has fatty aldehyde reductase activity (EC1.1.1.1). In some embodiments, the polypeptide is an alcohol dehydrogenase and/or has alcohol dehydrogenase activity. In certain embodiments, the polypeptide is an aldo-keto reductase and/or has aldo-keto reductase activity. In certain other embodiments, the polypeptide is a short-chain dehydrogenase and/or has short-chain dehydrogenase activity. In yet other embodiments, the polypeptide is an oxidoreductase and/or has oxidoreductase activity. In certain further embodiments, the polypeptide comprises one or more NAD(P)- or NAD(P)H-binding domains and/or is associated with an NAD(P) or NAD(P)H co-factor. In yet further embodiments, the three-dimensional or the predicted three-dimensional structure of the polypeptide comprises a Rossman fold.

[0123] In some embodiments, the fatty alcohol biosynthetic is a mutant or variant.

[0124] Various known activity assays can be used to determine the enzymatic activity of a putative fatty alcohol biosynthetic polypeptide. These assays can be suitable or useful for determining, for example, the expression or level of various fatty alcohol biosynthetic polypeptides in an engineered host cell or microorganism. For example, the capacity of a polypeptide to convert a fatty aldehyde into a fatty alcohol can be determined by measuring the rate of increase or decrease of NAD(P)H at 340 nm (ε=6.22 nM⁻¹ cm⁻¹) using aldehydes as substrates at 25° C. See, e.g., Schweiger et al., Appl. Microbiol. Biotechnol. (published online 31 Jul. 2009). Specifically, a 1.0 mL reaction mixture consisting of 5 mM aldehyde substrate, 40 mM potassium phosphate buffer, pH7.0, 125 μM NADPH and enzyme can be prepared. One unit can be defined as the amount of enzyme activity catalyzing the conversion of 1.0 μmol of pyridine nucleotide per minute. Alternatively, a similar assay with somewhat different conditions can be carried out to determine the fatty alcohol biosynthetic enzymatic activity. See, e.g., Wahlen et al., App. Environ. Microbiol. 75(9):2758-2764 (2009). Specifically, about 50 μg of purified enzyme can be added to a reaction mixture containing 100 mM Tris buffer at pH 7.9, 100 mM NaCl, 2.4 mM of either NADPH or NADH as a reactant, and decanal, oleic acid, and hexadecanol as possible substrates. Optionally the assay can be run under an argon atmosphere in septum-sealed vials overnight at room temperature with constant and gentle mixing. The products of the reaction can then be extracted from the buffer by adding an equal volume of hexane, and organic layer components can be analyzed by gas chromatography equipped with a flame ionization detector (30 m by 0.32 mm inner diameter with 0.5 μm film thickness, with argon as a carrier and a temperature ramp of for example, from 60° C. to 360° C., increasing at 10° C. per minute). A continuous spectrophotometric assay can also be developed to determine a given polypeptide's capacity to convert a fatty aldehyde into a fatty alcohol. The activity assays and conditions described in the examples herein are also suitable for this determination.

[0125] In some embodiments, the fatty alcohol biosynthetic polypeptide has an amino acid sequence that is at least about 50%, at least about 55%, at least about 60%, at least about 65%, at least about 70%, at least about 75%, at least about 80%, at least about 85%, at least about 90%, at least about 91%, at least about 92%, at least about 93%, at least about 94%, at least about 95%, at least about 96%, at least about 97%, at least about 98%, or at least about 99% identity to SEQ ID NO: 1, 3, 5, 7, 9, 11, 13, 15, 17, 19, 21, 23, 25, 27, 29, 31, 33, 35, 37, or 39. In some embodiments, the polypeptide has the amino acid sequence of SEQ ID NO: 1, 3, 5, 7, 9, 11, 13, 15, 17, 19, 21, 23, 25, 27, 29, 31, 33, 35, 37, or 39.

[0126] In some embodiments, the nucleotide sequence has at least about 50%, at least about 55%, at least about 60%, at least about 65%, at least about 70%, at least about 75%, at least about 80%, at least about 85%, at least about 90%, at least about 91%, at least about 92%, at least about 93%, at least about 94%, at least about 95%, at least about 96%, at least about 97%, at least about 98%, or at least about 99% identity to SEQ ID NO:2, 4, 6, 8, 10, 12, 14, 16, 18, 20, 22, 24, 26, 28, 30, 32, 34, 36, 38, or 40. In some embodiments, the nucleotide sequence is SEQ ID NO:2, 4, 6, 8, 10, 12, 14, 16, 18, 20, 22, 24, 26, 28, 30, 32, 34, 36, 38, or 40.

[0127] In other embodiments, the nucleotide sequence hybridizes to a complement of SEQ ID NO: 2, 4, 6, 8, 10, 12, 14, 16, 18, 20, 22, 24, 26, 28, 30, 32, 34, 36, 38, or 40, or to a fragment thereof, for example, under low stringency, medium stringency, high stringency, or very high stringency conditions, wherein the polynucleotide encodes a polypeptide that is capable of catalyzing the enzymatic conversion of a fatty aldehyde to a fatty alcohol under suitable conditions, for example, in the presence of suitable substrates and/or co-factors. In some embodiments, the polynucleotide encodes a fatty alcohol biosynthetic enzyme. In certain embodiments, the polynucleotide encodes a fatty aldehyde reductase and/or encodes a polypeptide having fatty aldehyde reductase activity. In some embodiments, the polynucleotides encodes an alcohol dehydrogenase and/or encodes a polypeptide having alcohol dehydrogenase activity. In other embodiments, the polynucleotide encodes an oxidoreductase and/or a polypeptide having oxidoreductase activity. In certain embodiments, the polynucleotide encodes an aldo-keto reductase and/or a polypeptide having aldo-keto reductase activity. In certain other embodiments, the polynucleotide encodes a short-chain dehydrogenase and/or a polypeptide having short-chain dehydrogenase activity. In yet further embodiments, the polypeptide comprises one or more NAD(P)- or NAD(P)H-binding domains or is associated with an NAD(P) or NAD(P)H co-factors. In other embodiments, the three-dimensional structure or the predicted three-dimensional structure of the polypeptide comprises a Rossman fold.

[0128] In any of the aspects of the invention described herein, the method can produce fatty alcohols comprising a C₆-C₂₆ fatty alcohol. In some embodiments, the fatty alcohol comprises a C₆, C₇, C₈, C₉, C₁₀, C₁₁, C₁₂, C₁₃, C₁₄, C₁₅, C₁₆, C₁₇, C₁₈, C₁₉, C₂₀, C₂₁, C₂₂, C₂₃, C₂₄, C₂₅, or a C₂₆ fatty alcohol. In particular embodiments, the fatty alcohol is a C₆, C₈, C₁₀, C₁₂, C₁₃, C₁₄, C₁₅, C₁₆, C₁₇, or C₁₈ fatty alcohol. In certain embodiments, the hydroxyl group of the fatty alcohol is in the primary (C₁) position. In other embodiments, the fatty alcohol comprises a straight chain fatty alcohol. In other embodiments, the fatty alcohol comprises a branched chain fatty alcohol. In yet other embodiments, the fatty alcohol comprises a cyclic moiety.

[0129] In some embodiments, the fatty alcohol is an unsaturated fatty alcohol. In other embodiments, the fatty alcohol is a monounsaturated fatty alcohol. In certain embodiments, the unsaturated fatty alcohol is a C6:1, C7:1, C8:1, C9:1, C10:1, C11:1, C12:1, C13:1, C14:1, C15:1, C16:1, C17:1, C18:1, C19:1, C20:1, C21:1, C22:1, C23:1, C24:1, C25:1, or a C26:1 unsaturated fatty alcohol. In yet other embodiments, the fatty alcohol is unsaturated at the omega-7 position. In certain embodiments, the unsaturated fatty alcohol comprises a cis double bond.

[0130] In yet other embodiments, the fatty alcohol is a saturated fatty alcohol. In any of the aspects of the invention described herein, a suitable substrate for the polypeptide can be a fatty aldehyde. In some embodiments, the fatty aldehyde comprises a C₆-C₂₆ fatty aldehyde. In some embodiments, the fatty aldehyde comprises a C₆, C₇, C₈, C₉, C₁₀, C₁₁, C₁₂, C₁₃, C₁₄, C₁₅, C₁₆, C₁₇, C₁₈, C₁₉, C₂₀, C₂₁, C₂₂, C₂₃, C₂₄, C₂₅, or a C₂₆ fatty aldehyde. In particular embodiments, the fatty aldehyde is a C₆, C₈, C₁₀, C₁₂, C₁₃, C₁₄, C₁₅, C₁₆, C₁₇, or C₁₈ fatty aldehyde.

[0131] In other embodiments, the fatty aldehyde comprises a straight chain fatty aldehyde. In other embodiments, the fatty aldehyde comprises a branched chain fatty aldehyde. In yet other embodiments, the fatty aldehyde comprise one or more cyclic moieties.

[0132] In some embodiments, the fatty aldehyde is an unsaturated fatty aldehyde. In other embodiments, the fatty aldehyde substrate is a monounsaturated fatty aldehyde. In yet other embodiments, the fatty aldehyde is a saturated fatty aldehyde.

[0133] In any of the aspects of the invention described herein, a suitable co-factor for the fatty alcohol biosynthetic polypeptide can be, for example, NAD, NADP, NADH, and/or NADPH. In some embodiments, the polypeptide comprises a co-factor binding domain or is associated with one of more of the co-factors. In particular embodiments, the three-dimensional structure or the predicted three-dimensional structure of the polypeptide comprises a Rossman fold.

[0134] In another aspect, the invention features an engineered microorganism comprising an exogenous control sequence stably incorporated into the genomic DNA of the microorganism upstream of a fatty alcohol biosynthetic polynucleotide comprising a nucleotide sequence having at least about 50% sequence identity to the nucleotide sequence of SEQ ID NO: 2, 4, 6, 8, 10, 12, 14, 16, 18, 20, 22, 24, 26, 28, 30, 32, 34, 36, 38, or 40, wherein the microorganism produces an increased level of a fatty alcohol relative to a wild-type microorganism.

[0135] In some embodiments, the nucleotide sequence has at least about 55%, at least about 60%, at least about 65%, at least about 70%, at least about 75%, at least about 80%, at least about 85%, at least about 90%, at least about 91%, at least about 92%, at least about 93%, at least about 94%, at least about 95%, at least about 96%, at least about 97%, at least about 98%, or at least about 99% identity to SEQ ID NO:2, 4, 6, 8, 10, 12, 14, 16, 18, 20, 22, 24, 26, 28, 30, 32, 34, 36, 38, or 40. In some embodiments, the nucleotide sequence is SEQ ID NO: 2, 4, 6, 8, 10, 12, 14, 16, 18, 20, 22, 24, 26, 28, 30, 32, 34, 36, 38, or 40.

[0136] In some embodiments, the fatty alcohol biosynthetic polynucleotide is endogenous to the microorganism.

[0137] In other embodiments, the microorganism is engineered to express a modified level of a gene encoding a fatty acid derivative enzyme. In certain embodiments, modifying the expression of a gene encoding a fatty acid derivative enzyme includes expressing a gene encoding a fatty acid derivative enzyme and/or increasing the expression or activity of an endogenous fatty acid derivative enzyme. In alternative embodiments, modifying the expression of a gene encoding a fatty acid derivative enzyme includes attenuating a gene encoding a fatty acid derivative enzyme and/or decreasing the expression or activity of an endogenous fatty acid derivative enzyme. In some embodiments, the fatty acid derivative enzyme is a fatty acid synthase. In other embodiments, the fatty acid derivative enzyme is a thioesterase (EC 3.1. 2.14 or EC 3.1.1.5). In particular embodiments, the thioesterase is encoded by tesA, tesA without leader sequence, tesB, fatB, fatB2, fatB3, fatA, or fatA1.

[0138] In certain embodiments, one or more of the fatty alcohol biosynthetic polypeptides are overexpressed relative to expression in a wild type host cell.

[0139] While not wishing to be bound by theory, it is believed that the fatty alcohol biosynthetic polypeptide described herein produce fatty alcohols from substrate via a reduction mechanism. In some instances, the substrate is a fatty aldehyde or a derivative thereof, a fatty alcohol having particular branching patterns and carbon chain lengths can be produced from a fatty aldehyde having those characteristics that would result in a particular fatty alcohol. The fatty aldehyde substrates can, in turn, be obtained from another reaction mechanism, including, for example, via a reaction converting a fatty acid catalyzed by a fatty aldehyde biosynthetic enzyme or via a reaction converting an acyl-ACP substrate catalyzed by an acyl-ACP reductase.

[0140] In addition, each step within a biosynthetic pathway that leads to the production of a fatty aldehyde derivative substrate can be modified to produce or overproduce the substrate of interest. For example, known genes involved in the fatty acid biosynthetic pathway or the fatty aldehyde pathway can be expressed, overexpressed, or attenuated in host cells to produce a desired substrate (see, e.g., various enzymes described in PCT/US08/058,788, incorporated by reference herein).

[0141] A suitable fatty acid substrate can be converted into a fatty aldehyde substrate by, for example, a fatty aldehyde biosynthetic polypeptide such as a carboxylic acid reductase, or an acyl-ACP reductase. For example, the fatty aldehyde biosynthetic polypeptide can be selected from those described herein, or variants thereof. Alternatively, the acyl-ACP reductase can be one selected from those described herein, or a variant thereof. Then, the fatty aldehyde substrate can be converted into a fatty alcohol by, for example, a gene encoding a fatty alcohol biosynthetic polypeptide of the present invention. In some example, a gene encoding a fatty alcohol biosynthetic polypeptide described herein can be expressed in a host cell that expresses an endogenous fatty alcohol biosynthetic polypeptide capable of converting a fatty aldehyde produced by the fatty aldehyde biosynthetic polypeptide into a corresponding fatty alcohol. In other instances, a gene encoding a fatty alcohol biosynthetic polypeptide described herein, such as an amino acid sequence selected from SEQ ID NO:1, 3, 5, 7, 9, 11, 13, 15, 17, 19, 21, 23, 25, 27, 29, 31, 33, 35, 37, or 39, or a variant thereof. In certain embodiments, the fatty alcohol biosynthetic polypeptide described herein can be encoded by a polynucleotide comprising a sequence of SEQ ID NO: 2, 4, 6, 8, 10, 12, 14, 16, 18, 20, 22, 24, 26, 28, 30, 32, 34, 36, 38, or 40, or a variant thereof.

[0142] In yet a further embodiment, the fatty alcohol biosynthetic polypeptide can be one selected from an AdhP homolog of FIG. 2, a DkgA homolog of FIG. 3, a DkgB homolog of FIG. 4, a Tas homolog of FIG. 5, an RspB homolog of FIG. 6, a YahK homolog of FIG. 7, a YbbO homolog of FIG. 8, a YbdH homolog of FIG. 9, a YbdR homolog of FIG. 10, a YgfF homolog of FIG. 11, a YhdH homomolg of FIG. 12, a YjgB homolog of FIG. 13, an AroB homolog of FIG. 14, a YcjQ homolog of FIG. 15, a YdbC Homolog of FIG. 16, a YdjG homolog of FIG. 17, a YeaE homolog of FIG. 18, aYncB homolog of FIG. 19, a YqhD homolog of FIG. 20, a YdjL homolog of FIG. 21, or a variant thereof. In certain embodiments, the gene encoding a fatty alcohol biosynthetic polypeptide can be co-expressed in a host cell with a gene encoding a fatty aldehyde biosynthetic polypeptide or with a gene encoding an acyl-ACP reductase polypeptide described herein.

[0143] In certain embodiment, the gene has a nucleotide sequence selected from those described herein, as well as polynucleotide variants thereof. In exemplary embodiments, the fatty alcohol biosynthetic gene is one encoding an AdhP homolog of FIG. 2, as well as polynucleotide variants thereof. In other exemplary embodiments, the fatty alcohol biosynthetic gene is one encoding a DkgA homolog of FIG. 3, or one encoding a DkgB homolog of FIG. 4, or one encoding a Tas homolog of FIG. 5, or one encoding a RspB homolog of FIG. 6, or one encoding a YahK homolog of FIG. 7, or one encoding a YbbO homolog of FIG. 8, or one encoding a YbdH homolog of FIG. 9, or one encoding a YbdR homolog of FIG. 10, or one encoding a YgfF homolog of FIG. 11, or one encoding a YhdH homolog of FIG. 12, or one encoding a YjgB homolog of FIG. 13, or one encoding an AroB homolog of FIG. 14, or one encoding the YcjQ homolog of FIG. 15, or one encoding a YdbC homolog of FIG. 16, or one encoding a YdjG homolog of FIG. 17, or one encoding a YeaE homolog of FIG. 18, or one encoding a YncB homolog of FIG. 19, or one encoding a YqhD homolog of FIG. 20, or one encoding a YdjL homolog of FIG. 21, or a variant thereof, can be used as a fatty alcohol biosynthetic polynucleotide in the methods described herein.

[0144] Suitable variants, such as those listed in, for example, FIGS. 2-21, can be identified using bioinformatic tools such as described hereinbelow.

### Synthesis of Substrates

[0145] Fatty acid synthase (FAS) is a group of polypeptides that catalyze the initiation and elongation of acyl chains (Marrakchi et al., Biochemical Society, 30:1050-1055, 2002). The acyl carrier protein (ACP) along with the enzymes in the FAS pathway control the length, degree of saturation, and branching of the fatty acid derivatives produced. The fatty acid biosynthetic pathway involves the precursors acetyl-CoA and malonyl-CoA. The steps in this pathway are catalyzed by enzymes of the fatty acid biosynthesis (fab) and acetyl-CoA carboxylase (acc) gene families (see, e.g., Heath et al., Prog. Lipid Res. 40(6):467-97 (2001)).

[0146] Host cells can be engineered to express fatty acid derivative substrates by recombinantly expressing or overexpressing one or more fatty acid synthase genes, such as acetyl-CoA and/or malonyl-CoA synthase genes. For example, to increase acetyl-CoA production, one or more of the following genes can be expressed in a host cell: pdh (a multienzyme complex comprising aceEF (which encodes the E1 p dehydrogenase component, the E2p dihydrolipoamide acyltransferase component of the pyruvate and 2-oxoglutarate dehydrogenase complexes, and lpd), panK, fabH, fabB, fabD, fabG, acpP, and fabF. Exemplary GenBank accession numbers for these genes are: pdh (BAB34380, AAC73227, AAC73226), panK (also known as CoA, AAC76952), aceEF (AAC73227, AAC73226), fabH (AAC74175), fabB (P0A953), fabD (AAC74176), fabG (AAC74177), acpP (AAC74178), fabF (AAC74179). Additionally, the expression levels of fadE, gpsA, ldhA, pflb, adhE, pta, poxB, ackA, and/or ackB can be attenuated or knocked-out in an engineered host cell by transformation with conditionally replicative or non-replicative plasmids containing null or deletion mutations of the corresponding genes or by substituting promoter or enhancer sequences. Exemplary GenBank accession numbers for these genes are: fadE (AAC73325), gspA (AAC76632), ldhA (AAC74462), pflb (AAC73989), adhE (AAC74323), pta (AAC75357), poxB (AAC73958), ackA (AAC75356), and ackB (BAB81430). The resulting host cells will have increased acetyl-CoA production levels when grown in an appropriate environment.

[0147] Malonyl-CoA overexpression can be affected by introducing accABCD (e.g., accession number AAC73296, EC 6.4.1.2) into a host cell. Fatty acids can be further overexpressed in host cells by introducing into the host cell a DNA sequence encoding a lipase (e.g., accession numbers CAA89087, CAA98876).

[0148] In addition, inhibiting P1sB can lead to an increase in the levels of long chain acyl-ACP, which will inhibit early steps in the pathway (e.g., accABCD, fabH, and fabl). The plsB (e.g., accession number AAC77011) D311E mutation can be used to increase the amount of available fatty acids.

[0149] In addition, a host cell can be engineered to overexpress a sfa gene (suppressor of fabA, e.g., accession number AAN79592) to increase production of monounsaturated fatty acids (Rock et al., J. Bacteriology 178:5382-5387, 1996).

[0150] The chain length of a fatty acid derivative substrate can be selected for by modifying the expression of selected thioesterases (EC 3.1. 2.14 or EC 3.1.1.5). The thioesterase influences the chain length of fatty acids produced. Hence, host cells can be engineered to express, overexpress, have attenuated expression, or not to express one or more selected thioesterases to increase the production of a preferred fatty acid derivative substrate. For example, C₁₀ fatty acids can be produced by expressing a thioesterase that has a preference for producing C₁₀ fatty acids and attenuating thioesterases that have a preference for producing fatty acids other than C₁₀ fatty acids (e.g., a thioesterase which prefers to produce C₁₄ fatty acids). This would result in a relatively homogeneous population of fatty acids that have a carbon chain length of 10. In other instances, C₁₄ fatty acids can be produced by attenuating endogenous thioesterases that produce non-C₁₄ fatty acids and expressing the thioesterases that use C₁₄-ACP. In some situations, C₁₂ fatty acids can be produced by expressing thioesterases that use C₁₂-ACP and attenuating thioesterases that produce non-C₁₂ fatty acids. Acetyl-CoA, malonyl-CoA, and fatty acid overproduction can be verified using methods known in the art, for example, by using radioactive precursors, HPLC, or GC-MS subsequent to cell lysis. Non-limiting examples of thioesterases that can be used in the methods described herein are listed in Table 1.

[0151] Table 1: Thioesterases

[0152] Mayer et al., BMC Plant Biology 7:1-11, 2007

[0153] In other instances, a fatty alcohol biosynthetic polypeptide, variant, or a fragment thereof, is expressed in a host cell that contains a naturally occurring mutation that results in an increased level of fatty acids in the host cell. In some instances, the host cell is genetically engineered to increase the level of fatty acids in the host cell relative to a corresponding wild-type host cell. For example, the host cell can be genetically engineered to express a reduced level of an acyl-CoA synthase (EC 2.3.1.86) relative to a corresponding wild-type host cell. For example, the host cell can be genetically engineered to express a reduced level of an acyl-CoA synthase relative to a corresponding wild-type host cell. In one embodiment, the level of expression of one or more genes (e.g., an acyl-CoA synthase gene) is reduced by genetically engineering a “knock out” host cell.

[0154] Any known acyl-CoA synthase gene can be reduced or knocked out in a host cell. Non-limiting examples of acyl-CoA synthase genes include fadD, fadK, BH3103, yhfL, Pfl-4354, EAV15023, fadD1, fadD2, RPC_{—}4074, fadDD35, fadDD22, faa3p or the gene encoding the protein ZP_{—}01644857. Specific examples of acyl-CoA synthase genes include fadDD35 from M. tuberculosis H37Rv [NP_{—}217021], AdDD22 from M. tuberculosis H37Rv [NP_{—}217464], fadD from E. coli [NP_{—}416319], fadK from E. coli [YP_{—}416216], fadD from Acinetobacter sp. ADP1 [YP_{—}045024], fadD from Haemophilus influenza RdkW20 [NP_{—}438551], fadD from Rhodopseudomonas palustris Bis B18 [YP_{—}533919], BH3101 from Bacillus halodurans C-125 [NP_{—}243969], Pfl-4354 from Pseudomonas fluorescens Pfo-1 [YP_{—}350082], EAV15023 from Comamonas testosterone KF-1 [ZP_{—}01520072], yhfL from B. subtilis [NP_{—}388908], fadD1 from P. aeruginosa PAO1 [NP_{—}251989], fadD1 from Ralstonia solanacearum GM1 1000 [NP_{—}520978], fadD2 from P. aeruginosa PAO1 [NP_{—}251990], the gene encoding the protein ZP_{—}01644857 from Stenotrophomonas maltophilia R551-3, faa3p from Saccharomyces cerevisiae [NP_{—}012257], faalp from Saccharomyces cerevisiae [NP_{—}014962], lcfA from Bacillus subtilis [CAA99571], or those described in Shockey et al., Plant. Physiol. 129:1710-1722, 2002; Caviglia et al., J. Biol. Chem. 279:1163-1169, 2004; Knoll et al., J. Biol. Chem. 269(23):16348-56, 1994; Johnson et al., J. Biol. Chem. 269: 18037-18046, 1994; and Black et al., J. Biol. Chem. 267: 25513-25520, 1992.

### Fatty Aldehyde Substrates

[0155] Fatty aldehyde biosynthetic polypeptides refer to a group of polypeptides that can catalyze the enzymatic conversion of suitable fatty acid substrates into fatty aldehydes. Host cells can be engineered to express fatty aldehyde substrates by recombinantly expressing or overexpressing one or more fatty aldehyde biosynthetic genes, such as carboxylic acid reductases or fatty acid reductases.

[0156] In this pathway, a fatty acid is first activated by ATP and then reduced by a carboxylic acid reductase (CAR)-like enzyme to generate a fatty aldehyde. In some embodiments, a fatty aldehyde is produced by expressing a fatty aldehyde biosynthetic gene, for example, a carboxylic acid reductase gene (car gene), having a nucleotide sequence provided herein, as well as nucleotide variants thereof. Examplary genes encode a polypeptide comprising SEQ ID NO: 41, 43, 45, 47, 49, 51, 53, 55, 57, 59, 61, 63, 65, 69, 71, 73, 75, 77, 79, 81, 83, 85, 87, 89, 91, 93, 97, 99, 101, 103, 105, 107, 109, 111, 113, 115, 117, 119, 121, 123, 125, 127, or a variant thereof. In another example, the gene can comprise a polynucleotide sequence of SEQ ID NO: 42, 44, 46, 48, 50, 52, 54, 56, 58, 60, 62, 64, 66, 68, 70, 72, 74, 76, 78, 80, 82, 84, 86, 88, 90, 92, 94, 96, 98, 100, 102, 104, 106, 108, 110, 112, 114, 116, 118, 120, 122, 124, 126, or 128, or a variant thereof. In further embodiments, the fatty aldehyde biosynthetic polypeptide can comprise one or more of the amino acid motifs depicted herein in SEQ ID NO: 129-135. For example, the fatty aldehyde biosynthetic gene can encode a polypeptide comprising SEQ ID NO:129, SEQ ID NO:130, SEQ ID NO:131, and SEQ ID NO:132; SEQ ID NO:133; SEQ ID NO:134; SEQ ID NO:135; SEQ ID NO: 136; and/or SEQ ID NO:129, SEQ ID NO:131, SEQ ID NO:132, and SEQ ID NO:133.

[0157] Alternatively, fatty aldehyde substrates can be produced using an enzymatic pathway involving an acyl-ACP reductase. In some embodiments, a fatty aldehyde can be produced from a suitable substrate, including, for example, an acyl-ACP, an acyl-CoA, or others, by expressing an acyl-ACP reductase gene (aar gene), having a nucleotide sequence provided herein, as well as nucleotide variants thereof. For example, the acyl-ACP reductase gene can encode a polypeptide comprising SEQ ID NO: 155, 156, 157, 158, 159, 160, 161, 162, 163, 164, or 165.

[0158] Other substrates that can be used to produce fatty aldehydes and fatty alcohols in the methods described herein are acyl-ACP, acyl-CoA, fatty aldehydes, or fatty alcohols, which are described in, for example, PCT/US08/058,788, the disclosure of which is incorporated herein by reference.

### Fatty Acid Degradation Enzymes

[0159] In some embodiments, the host cell is genetically engineered to express an attenuated level of a fatty acid degradation enzyme relative to a wild type host cell. In some embodiments, the host cell is genetically engineered to express an attenuated level of an acyl-CoA synthase (EC 2.3.1.86) relative to a wild type host cell. In particular embodiments, the host cell expresses an attenuated level of an acyl-CoA synthase encoded by fadD, fadK, BH3103, yhfL, Pfl-4354, EAV15023, fadD1, fadD2, RPC 4074, fadDD35, fadDD22, faa3p or the gene encoding the protein ZP_{—}01644857. In certain embodiments, the genetically engineered host cell comprises a knockout of one or more genes encoding a fatty acid degradation enzyme, such as the aforementioned acyl-CoA synthase genes.

[0160] In yet other embodiments, the host cell is genetically engineered to express an attenuated level of a dehydratase/isomerase enzyme, such as an enzyme encoded by fabA or by a gene listed in the table of FIG. 22. In some embodiments, the host cell comprises a knockout of fabA or a gene listed in the table of FIG. 22. In other embodiments, the host cell is genetically engineered to express an attenuated level of a ketoacyl-ACP synthase, such as an enzyme encoded by fabB or by a gene listed in the table of FIG. 23. In certain embodiments, the host cell comprises a knockout of fabB or a gene listed in the table of FIG. 23. In yet other embodiments, the host cell is genetically engineered to express a modified level of a gene encoding a desaturase enzyme, such as desA.

### Formation of Branched Fatty Alcohols

[0161] Fatty alcohols can be produced from fatty aldehydes substrates that contain branched points by using a fatty alcohol biosynthetic polypeptide as described herein. In turn, the branched fatty aldehydes can be made from branched fatty acid derivatives as substrates for a fatty aldehyde biosynthetic polypeptide as described herein. For example, although E. coli naturally produces straight chain fatty acids (sFAs), E. coli can be engineered to produce branched chain fatty acids (brFAs) by introducing and expressing or overexpressing genes that provide branched precursors in the E. coli (e.g., bkd, ilv, icm, and fab gene families). Additionally, a host cell can be engineered to express or overexpress genes encoding proteins for the elongation of brFAs (e.g., ACP, FabF, etc.) and/or to delete or attenuate the corresponding host cell genes that normally lead to sFAs.

### Fatty Alcohol Saturation Levels

[0162] The degree of saturation in fatty acids (which can then be converted into fatty aldehydes and then fatty alcohols as described herein) can be controlled by regulating the degree of saturation of fatty acid intermediates. For example, the sfa, gns, and fab families of genes can be expressed, overexpressed, or expressed at reduced levels, to control the saturation of fatty acids. Non-limiting examples of these genes include sfa [GenBank Accession No. AAN 79592, AAC 44390], gnsA [GenBank Accession No. ABD 18647.1], gnsB [GenBank Accession No. AAC 74076.1], fabB [GenBank Accession No. BAA 16180, EC 2.3.1.41], fabK [GenBank Accession No. AAF 98273, EC1.3.1.9], fabL [GenBank Accession No. AAG 39821, EC 1.3.1.9], orfabM [GenBank Accession No. DAA 05501, EC 4.2.1.17].

[0163] For example, host cells can be engineered to produce unsaturated fatty acids by engineering the production host to overexpress fabB or by growing the production host at low temperatures (e.g., less than 37° C.). FabB has preference to cis-δ3decenoyl-ACP and results in unsaturated fatty acid production in E. coli. Overexpression of fabB results in the production of a significant percentage of unsaturated fatty acids (de Mendoza et al., J. Biol. Chem. 258:2098-2101, 1983). The gene fabB may be inserted into and expressed in host cells not naturally having the gene. These unsaturated fatty acids can then be used as intermediates in host cells that are engineered to produce fatty acid derivatives, such as fatty aldehydes.

[0164] In other instances, a repressor of fatty acid biosynthesis, for example, fabR (GenBank accession NP_{—}418398), can be deleted, which will also result in increased unsaturated fatty acid production in E. coli (Zhang et al., J. Biol. Chem. 277:15558, 2002). Similar deletions may be made in other host cells. A further increase in unsaturated fatty acids may be achieved, for example, by overexpressing fabM (trans-2, cis-3-decenoyl-ACP isomerase, GenBank accession DAA05501) and controlled expression of fabK (trans-2-enoyl-ACP reductase II, GenBank accession NP_{—} 357969) from Streptococcus pneumoniae (Marrakchi et al., J. Biol. Chem. 277: 44809, 2002), while deleting E. coli fabl (trans-2-enoyl-ACP reductase, GenBank accession NP_{—}415804). In some examples, the endogenous fabF gene can be attenuated, thus increasing the percentage of palmitoleate (C16:1) produced.

[0165] In yet other examples, host cells can be engineered to produce saturated fatty acids by reducing the expression of an sfa, gns, and/or fab gene.

### Formation of Cyclic Fatty Alcohols

[0166] Cyclic fatty alcohols can be produced from cyclic fatty aldehydes using cyclic fatty acid derivatives as substrates for a fatty aldehyde biosynthetic polypeptide described herein. To produce cyclic fatty acid derivative substrates, genes that provide cyclic precursors (e.g., the ans, chc, and plm gene families) can be introduced into the host cell and expressed to allow initiation of fatty acid biosynthesis from cyclic precursors.

### Fatty Aldehyde Biosynthetic Genes and Polypeptides.

[0167] In some embodiments, the microorganism is further engineered to express a modified level of a gene encoding a fatty aldehyde biosynthesis polypeptide. In certain embodiments, modifying the expression of a gene encoding a fatty aldehyde biosynthesis polypeptide includes expressing a gene encoding a fatty aldehyde biosynthetic enzyme and/or increasing the expression or activity of an endogenous fatty aldehyde biosynthetic enzyme. In some embodiments, the fatty aldehyde biosynthesis gene encodes a carboxylic acid reductase. In further embodiments, the fatty aldehyde biosynthetic gene encodes a fatty acid reductase.

[0168] In particular embodiments, the fatty aldehyde biosynthetic polypeptide comprises the amino acid sequence of SEQ ID NO: 41, 43, 45, 47, 49, 51, 53, 55, 57, 59, 61, 63, 65, 69, 71, 73, 75, 77, 79, 81, 83, 85, 87, 89, 91, 93, 97, 99, 101, 103, 105, 107, 109, 111, 113, 115, 117, 119, 121, 123, 125, 127, or a variant thereof. In some embodiments, the fatty aldehyde biosynthetic polypeptide comprises an amino acid sequence having at least about 80% (e.g., at least about 80%, at least about 85%, at least about 90%, at least about 91%, at least about 92%, at least about 93%, at least about 94%, at least about 95%, at least about 96%, at least about 97%, at least about 98%, at least about 99%) sequence identity to the amino acid sequence of SEQ ID NO: 41, 43, 45, 47, 49, 51, 53, 55, 57, 59, 61, 63, 65, 69, 71, 73, 75, 77, 79, 81, 83, 85, 87, 89, 91, 93, 97, 99, 101, 103, 105, 107, 109, 111, 113, 115, 117, 119, 121, 123, 125, or 127.

[0169] In another embodiment, the fatty aldehyde biosynthetic polypeptide is encoded by a polynucleotide having the sequence of SEQ ID NO:42, 44, 44, 46, 48, 50, 52, 54, 56, 58, 60, 62, 64, 66, 68, 70, 72, 74, 76, 78, 80, 82, 84, 86, 88, 90, 92, 94, 96, 98, 100, 102, 104, 106, 108, 110, 112, 114, 116, 118, 120, 122, 124, 126, or 128, or by a variant thereof. In some embodiments, the fatty aldehyde biosynthetic polypeptide is encoded by a polynucleotide having at least 80% sequence identity to the sequence of SEQ ID NO:42, 44, 46, 48, 50, 52, 54, 56, 58, 60, 62, 64, 66, 68, 70, 72, 74, 76, 78, 80, 82, 84, 86, 88, 90, 92, 94, 96, 98, 100, 102, 104, 106, 108, 110, 112, 114, 116, 118, 120, 122, 124, 126, or 128. In some embodiments, the method further comprises expressing a gene encoding a fatty aldehyde biosynthesis polypeptide in the host cell. In particular embodiments, the fatty aldehyde biosynthetic polypeptide comprises the amino acid sequence of SEQ ID NO: 41, 43, 45, 47, 49, 51, 53, 55, 57, 59, 61, 63, 65, 69, 71, 73, 75, 77, 79, 81, 83, 85, 87, 89, 91, 93, 97, 99, 101, 103, 105, 107, 109, 111, 113, 115, 117, 119, 121, 123, 125, 127, or a variant thereof. In some embodiment, the fatty aldehyde biosynthetic polypeptide comprises an amino acid sequence having at least about 80% sequence identity to SEQ ID NO: 41, 43, 45, 47, 49, 51, 53, 55, 57, 59, 61, 63, 65, 69, 71, 73, 75, 77, 79, 81, 83, 85, 87, 89, 91, 93, 97, 99, 101, 103, 105, 107, 109, 111, 113, 115, 117, 119, 121, 123, 125, or 127. In another embodiment, the fatty aldehyde biosynthetic polypeptide is encoded by a polynucleotide having the sequence of SEQ ID NO: 42, 44, 46, 48, 50, 52, 54, 56, 58, 60, 62, 64, 66, 68, 70, 72, 74, 76, 78, 80, 82, 84, 86, 88, 90, 92, 94, 96, 98, 100, 102, 104, 106, 108, 110, 112, 114, 116, 118, 120, 122, 124, 126, 128, or by a variant thereof. In some embodiments, the fatty aldehyde biosynthetic polypeptide is encoded by a polynucleotide having at least about 80% sequence identity to SEQ ID NO: 42, 44, 46, 48, 50, 52, 54, 56, 58, 60, 62, 64, 66, 68, 70, 72, 74, 76, 78, 80, 82, 84, 86, 88, 90, 92, 94, 96, 98, 100, 102, 104, 106, 108, 110, 112, 114, 116, 118, 120, 122, 124, 126, or 128. In further embodiments, the method comprises expressing a gene encoding a fatty aldehyde biosynthetic polypeptide comprising one or more of the amino acid motifs provided herein. For example, the fatty aldehyde biosynthetic gene can encode a polypeptide comprising SEQ ID NO:129, SEQ ID NO:130, SEQ ID NO:131, and SEQ ID NO:132; SEQ ID NO:133; SEQ ID NO:134; SEQ ID NO:135; SEQ ID NO: 136; and/or SEQ ID NO:129, SEQ ID NO:131, SEQ ID NO:132 and SEQ ID NO:133. SEQ ID NO:131 includes a reductase domain; SEQ ID NO:132 includes an NADP-binding domain; SEQ ID NO:133 includes a phosphopantetheine attachment site; and SEQ ID NO:134 includes an AMP-binding domain.

### Acyl-ACP Reductase Genes and Polypeptides.

[0170] In certain other embodiments, the invention further includes expressing in a host cell a gene encoding an acyl-ACP reductase polypeptide in the host cell. In some embodiments, the acyl-ACP reductase polypeptide comprises the amino acid sequence of SEQ ID NO: 137, 139, 141, 143, 145, 147, 149, 151, 153, or a variant thereof. In some embodiments, the acyl-ACP reductase polypeptide comprises an amino acid sequence that has at least about 70% (e.g., at least about 70%, at least about 75%, at least about 80%, at least about 85%, at least about 90%, at least about 91%, at least about 92%, at least about 93%, at least about 94%, at least about 95%, at least about 96%, at least about 97%, at least about 98%, at least about 99%, or at least about 99%) sequence identity to SEQ ID NO: 137, 139, 141, 143, 145, 147, 149, 151, or 153. In another embodiment, the acyl-ACP reductase polypeptide is encoded by a polynucleotide having the sequence of SEQ ID NO: 138, 140, 142, 144, 146, 148, 150, 152, or 154, or by a variant thereof. In some embodiments, the acyl-ACP reductase polypeptide is encoded by a polynucleotide having at least about 70% sequence identity to the sequence of SEQ ID NO: 138, 140, 142, 144, 146, 148, 150, 152, or 154.

[0171] In yet further embodiments, the method includes expressing in a host cell an acyl-ACP reductase gene encoding a polypeptide comprising one or more of the amino acid motifs disclosed herein. For example, the polypeptide can comprise one or more of SEQ ID NO:155, 156, 157, 158, 159, 160, 161, 162, 163, 164, or 165.

### Hydrocarbon Biosynthetic Genes and Polypeptides.

[0172] The compositions and methods described herein can be used to produce hydrocarbons, including, for example, alkanes and alkenes, from an appropriate substrate.

[0173] The invention is based, at least in part, on the identification of a number of fatty alcohol biosynthetic enzymes or polypeptides that are capable of catalyzing the conversion of a fatty aldehyde to a fatty alcohol under suitable conditions, for example, in the presence of suitable substrates and/or co-factors. One or more of these fatty alcohol biosynthetic polypeptides can be attenuated or deleted from the host cell, which expresses or overexpresses one or more hydrocarbon biosynthetic polypeptides, optionally also expresses or overexpresses one or more fatty aldehyde biosynthetic polypeptides or one or more acyl-ACP reductases. The resulting host cell can be used to produce hydrocarbons such as, for example, alkanes or alkenes. In certain embodiments, the hydrocarbons are produced by a biosynthetic pathway depicted in FIG. 1B. In this pathway, a fatty acid is first activated by ATP and then reduced by a fatty aldehyde biosynthetic polypeptide such as a carboxylic acid reductase (CAR)-like enzyme to generate a fatty aldehyde. The fatty aldehyde can then be subject to a hydrocarbon biosynthetic polypeptide such as a decarbonylase and be reduced into a hydrocarbon. In certain other embodiments, hydrocarbons are produced by an alternative biosynthesis pathway depicted in FIG. 1B. In this pathway, an acyl-ACP is converted into a fatty aldehyde catalyzed by an acyl-ACP reductase. The fatty aldehyde is further subject to a hydrocarbon biosynthetic polypeptide and converts to a hydrocarbon such as an alkane or an alkene. In both of these pathways, the fatty aldehydes can, in the presence of endogenous fatty alcohol biosynthetic enzyme activity, be converted into fatty alcohols. Therefore, attenuating one or more fatty alcohol biosynthetic polypeptides, or in particular embodiments, deleting one or more fatty alcohol biosynthetic polypeptides from the host cell can improve the production of hydrocarbons. In some embodiments, the method further includes culturing the host cell in the presence of at least one biological substrate of the hydrocarbon biosynthetic polypeptide, the fatty aldehyde biosynthetic polypeptide, and/or the acyl-ACP reductase polypeptide. Exemplary suitable substrates include, without limitation, a fatty acid derivative, an acyl-ACP, a fatty acid, an acyl-CoA, a fatty aldehyde, a fatty alcohol, or a fatty ester.

[0174] In another aspect, the invention features a method of producing a hydrocarbon, the method comprising expressing an attenuated level of one or more fatty alcohol biosynthetic genes or a mutant and variant thereof in a host cell. In certain embodiments, the method further comprises deleting one or more fatty alcohol biosynthetic genes or a mutant and variant thereof from the host cell. Fatty alcohol biosynthetic genes, polypeptides, sequence motifs, mutants and variants thereof, are described hereinabove.

[0175] In certain other embodiments, the host cell is engineered such that it comprises no detectable level of fatty alcohol biosynthetic enzyme activity, for example, a fatty aldehyde reductase activity, an alcohol dehydrogenase activity, an aldo-keto reductase activity, an oxidoreductase activity, or a short-chain dehydrogenase activity.

[0176] In some embodiments, the method further comprises expressing a gene encoding a hydrocarbon biosynthetic polypeptide in the host cell. In particular embodiments, the hydrocarbon biosynthetic polypeptide comprises the amino acid sequence of SEQ ID NO: 166, 168, 170, 172, 174, 176, 178, 180, 182, 184, 186, 188, 190, 192, 194, 196, 198, 200, or a variant thereof. In some embodiments, the hydrocarbon biosynthetic polypeptide comprises at least about 70% sequence identity to SEQ ID NO: 166, 168, 170, 172, 174, 176, 178, 180, 182, 184, 186, 188, 190, 192, 194, 196, 198, or 200. In another embodiment, the hydrocarbon biosynthetic polypeptide is encoded by a polynucleotide having the sequence of SEQ ID NO: 167, 169, 171, 173, 175, 177, 179, 181, 183, 185, 187, 189, 191, 193, 195, 197, 199, or 201, or by a variant thereof. In some embodiments, the hydrocarbon biosynthetic polypeptide is encoded by a polynucleotide having at least about 70% sequence identity to SEQ ID NO: 167, 169, 171, 173, 175, 177, 179, 181, 183, 185, 187, 189, 191, 193, 195, 197, 199, or 201. In further embodiments, the method comprises expressing a gene encoding a hydrocarbon biosynthetic polypeptide comprising one or more amino acid motifs disclosed herein. For example, the hydrocarbon biosynthetic polypeptide can comprise the amino acid sequence motifs of: (1) SEQ ID NO: 202; or (2) SEQ ID NO: 203 or SEQ ID NO:204, or SEQ ID NO:205; or (3) SEQ ID NO:206, and any one of SEQ ID NO:203, SEQ ID NO:204, SEQ ID NO:205; or (4) SEQ ID NO:207 or SEQ ID NO:208, or SEQ ID NO:209, or SEQ ID NO:210. In certain embodiments, the hydrocarbon biosynthetic polypeptide has decarbonylase activity. In some embodiments, the method further comprises isolating the hydrocarbon from the host cell.

[0177] In some embodiments, the method further comprises expressing a gene encoding a fatty aldehyde biosynthesis polypeptide in the host cell. Fatty aldehyde biosynthetic genes, polypeptides, sequence motifs, mutants, and variants thereof are described hereinabove.

[0178] In any of the aspects of the invention described herein, the method can produce hydrocarbons. In some embodiments, the hydrocarbon produced is an alkane. In some embodiments, the alkane is a C₃-C₂₅ alkane. For example, the alkane is a C₃, C₄, C₅, C₆, C₇, C₈, C₉, C₁₀, C₁₁, C₁₂, C₁₃, C₁₄, C₁₅, C₁₆, C₁₇, C₁₈, C₁₉, C₂₀, C₂₁, C₂₂, C₂₃, C₂₄, or C₂₋₅ alkane. In some embodiments, the alkane is tridecane, methyltridecane, nonadecane, methylnonadecane, heptadecane, methylheptadecane, pentadecane, or methylpentadecane.

[0179] In certain embodiments, the method further comprising culturing the host cell in the presence of a saturated fatty acid derivative, and the hydrocarbon produced is an alkane. In certain embodiments, the saturated fatty acid derivative is a C₆-C₂₆ fatty acid derivative substrate. For example, the fatty acid derivative substrate is a C₆, C₇, C₈, C₉, C₁₀, C₁₁, C₁₂, C₁₃, C₁₄, C₁₅, C₁₆, C₁₇, C₁₈, C₁₉, C₂₀, C₂₁, C₂₂, C₂₃, C₂₄, C₂₅, or a C₂₆ fatty acid derivative substrate. In particular embodiments, the fatty acid derivative substrate is 2-methylicosanal, icosanal, octadecanal, tetradecanal, 2-methyloctadecanal, stearaldehyde, or palmitaldehyde.

[0180] In some embodiments, the method further includes isolating the alkane from the host cell or from the culture medium. In certain embodiments, the method further includes cracking or refining the alkane.

[0181] In any of the aspects of the invention herein, the hydrocarbon carbon produced can be an alkene. In some embodiments, the alkene is a C₃-C₂₅ alkene. For example, the alkene is a C₃, C₄, C₅, C₆, C₇, C₈, C₉, C₁₀, C₁₁, C₁₂, C₁₃, C₁₄, C₁₅, C₁₆, C₁₇, C₁₈, C₁₉, C₂₀, C₂₁, C₂₂, C₂₃, C₂₄, or C₂₋₅ alkene. In some embodiments, the alkene is pentadecene, heptadecene, methylpentadecene, or methylheptadecene.

[0182] In some embodiments, the alkene is a straight chain alkene, a branched chain alkene, or a cyclic alkene.

[0183] In certain embodiments, the method further comprises culturing the host cell in the presence of an unsaturated fatty acid derivative, and the hydrocarbon produced is an alkene. In certain embodiments, the unsaturated fatty acid derivative is a C₆-C₂₆ fatty acid derivative substrate. For example, the fatty acid derivative substrate is a C₆, C₇, C₈, C₉, C₁₀, C₁₁, C₁₂, C₁₃, C₁₄, C₁₅, C₁₆, C₁₇, C₁₈, C₁₉, C₂₀, C₂₁, C₂₂, C₂₃, C₂₄, C₂₅, or a C₂₆ unsaturated fatty acid derivative substrate. In particular embodiments, the fatty acid derivative substrate is octadecenal, hexadecenal, methylhexadecenal, or methyloctadecenal.

[0184] In another aspect, the invention features a genetically engineered microorganism wherein the microorganism produces an increased level of a hydrocarbon relative to a wild-type microorganism.

[0185] In another aspect, the invention features a method of making a hydrocarbon, the method comprising culturing a genetically engineered microorganism described herein under conditions suitable for gene expression, and isolating the hydrocarbon. In certain embodiments, the method comprising culturing the genetically engineered microorganism in the presence of a suitable biological substrate for the hydrocarbon biosynthetic polypeptide, the fatty aldehyde biosynthetic polypeptide, and/or the acyl-ACP reductase.

[0186] In some embodiments, the biological substrate is a fatty acid derivative, an acyl-ACP, a fatty acid, an acyl-CoA, a fatty aldehyde, a fatty alcohol, or a fatty ester.

[0187] In some embodiments, the substrate is a saturated fatty acid derivative, and the hydrocarbon produced is an alkane, for example, a C₃-C₂₅ alkane. For example, the alkane is a C₃, C₄, C₅, C₆, C₇, C₈, C₉, C₁₀, C₁₁, C₁₂, C₁₃, C₁₄, C₁₅, C₁₆, C₁₇, C₁₈, C₁₉, C₂₀, C₂₁, C₂₂, C₂₃, C₂₄, or C₂₋₅ alkane. In some embodiments, the alkane is tridecane, methyltridecane, nonadecane, methylnonadecane, heptadecane, methylheptadecane, pentadecane, or methylpentadecane.

[0188] In some embodiments, the alkane is a straight chain alkane, a branched chain alkane, or a cyclic alkane.

[0189] In some embodiments, the saturated fatty acid derivative is 2-methylicosanal, icosanal, octadecanal, tetradecanal, 2-methyloctadecanal, stearaldehyde, or palmitaldehyde.

[0190] In other embodiments, the biological substrate is an unsaturated fatty acid derivative and the hydrocarbon produced by the microorganism is an alkene, for example, a C₃-C₂₅ alkene. For example, the alkene is a C₃, C₄, C₅, C₆, C₇, C₈, C₉, C₁₀, C₁₁, C₁₂, C₁₃, C₁₄, C₁₅, C₁₄, C₁₅, C16, C17, C18, C₁₉, C₂₀, C₂₁, C₂₂, C₂₃, C₂₄, or C₂₋₅ alkene. In some embodiments, the alkene is pentadecene, heptadecene, methylpentadecene, or methylheptadecene.

[0191] In some embodiments, the alkene is a straight chain alkene, a branched chain alkene, or a cyclic alkene. In some embodiments, the unsaturated fatty acid derivative is octadecenal, hexadecenal, methylhexadecenal, or methyloctadecenal.

[0192] In another aspect, the invention features a hydrocarbon produced by any of the methods or microorganisms described herein. In particular embodiments, the hydrocarbon is an alkane or an alkene having a δ¹³C of about −15.4 or greater. In certain embodiments, the alkane or alkene has a δ¹³C of about −15.4 to about −10.9, or of about −13.92 to about −13.84.

[0193] In other embodiments, the alkane or alkene has an f_{M}¹⁴C of at least about 1.003. In certain embodiments, the alkene or alkene has an f_{M}¹⁴C of at least about 1.01 or at least about 1.5. In some embodiments, the alkane or alkene has an f_{M}¹⁴C of about 1.111 to about 1.124.

[0194] In another aspect, the invention features a biofuel comprising a hydrocarbon produced by any of the methods or microorganisms described herein. In particular embodiments, the hydrocarbon is an alkane or an alkene having a δ¹³C of about −15.4 or greater. In exemplary embodiments, the alkane or alkene has a δ¹³C of about −15.4 to about −10.9, or of about −13.92 to about −13.84. In other embodiments, the alkane or alkene has an f_{M}¹⁴C of at least about 1.003. For example, the alkane or alkene has an f_{M}¹⁴C of at least about 1.003. For example, the alkane or alkene has an f_{M}¹⁴C of at least about 1.01 or at least about 1.5. In some embodiments, the alkane or alkene has an f_{M}¹⁴C of about 1.111 to about 1.124.

[0195] In any of the aspects described herein, a hydrocarbon is produced in a host cell or a microorganism described herein from a carbon source.

### Variants

[0196] As used herein, a “variant” of polypeptide X refers to a polypeptide having the amino acid sequence of peptide X in which one or more amino acid residues is altered. The variant may have conservative changes or nonconservative changes. Guidance in determining which amino acid residues may be substituted, inserted, or deleted without affecting biological activity may be found using computer programs well known in the art, for example, LASERGENE software (DNASTAR). The term “variant,” when used in the context of a polynucleotide sequence, may encompass a polynucleotide sequence related to that of a gene or the coding sequence thereof. This definition may also include, for example, “allelic,” “splice,” “species,” or “polymorphic” variants. A splice variant may have significant identity to a reference polynucleotide, but will generally have a greater or fewer number of polynucleotides due to alternative splicing of exons during mRNA processing. The corresponding polypeptide may possess additional functional domains or an absence of domains. Species variants are polynucleotide sequences that vary from one species to another. The resulting polypeptides generally will have significant amino acid identity relative to each other. A polymorphic variant is a variation in the polynucleotide sequence of a particular gene between individuals of a given species.

[0197] Suitable variants, such as those described herein, for example in FIGS. 2-21, can be identified using bioinformatic tools such as searching for the “bidirectional best hits” against the public databases, such as for example, the Kyoto Encyclopedia of Gene & Genomes (KEGG) database, and selecting bidirectional best hits having a Smith-Waterman score of for example, above 1000. Other bioinformatics tools known to those skilled in the art, including for example, a bi-directional blast against known genome databases and the E. coli genome, can also be used for this purpose to identify homologs.

[0198] Variants can be naturally occurring or created in vitro. In particular, such variants can be created using genetic engineering techniques, such as site directed mutagenesis, random chemical mutagenesis, Exonuclease III deletion procedures, or standard cloning techniques. Alternatively, such variants, fragments, analogs, or derivatives can be created using chemical synthesis or modification procedures.

[0199] Methods of making variants are well known in the art. These include procedures in which nucleic acid sequences obtained from natural isolates are modified to generate nucleic acids that encode polypeptides having characteristics that enhance their value in industrial or laboratory applications. In such procedures, a large number of variant sequences having one or more nucleotide differences with respect to the sequence obtained from the natural isolate are generated and characterized. Typically, these nucleotide differences result in amino acid changes with respect to the polypeptides encoded by the nucleic acids from the natural isolates.

[0200] For example, variants can be created using error prone PCR (see, e.g., Leung et al., Technique 1:11-15, 1989; and Caldwell et al., PCR Methods Applic. 2:28-33, 1992). In error prone PCR, PCR is performed under conditions where the copying fidelity of the DNA polymerase is low, such that a high rate of point mutations is obtained along the entire length of the PCR product. Briefly, in such procedures, nucleic acids to be mutagenized (e.g., a fatty aldehyde biosynthetic polynucleotide sequence), are mixed with PCR primers, reaction buffer, MgCl₂, MnCl₂, Taq polymerase, and an appropriate concentration of dNTPs for achieving a high rate of point mutation along the entire length of the PCR product. For example, the reaction can be performed using 20 fmoles of nucleic acid to be mutagenized (e.g., a fatty aldehyde biosynthetic polynucleotide sequence), 30 pmole of each PCR primer, a reaction buffer comprising 50 mM KCl, 10 mM Tris HCl (pH 8.3), and 0.01% gelatin, 7 mM MgCl₂, 0.5 mM MnCl₂, 5 units of Taq polymerase, 0.2 mM dGTP, 0.2 mM dATP, 1 mM dCTP, and 1 mM dTTP. PCR can be performed for 30 cycles of 94° C. for 1 min, 45° C. for 1 min, and 72° C. for 1 min. However, it will be appreciated that these parameters can be varied as appropriate. The mutagenized nucleic acids are then cloned into an appropriate vector and the activities of the polypeptides encoded by the mutagenized nucleic acids are evaluated.

[0201] Variants can also be created using oligonucleotide directed mutagenesis to generate site-specific mutations in any cloned DNA of interest. Oligonucleotide mutagenesis is described in, for example, Reidhaar-Olson et al., Science 241:53-57, 1988. Briefly, in such procedures a plurality of double stranded oligonucleotides bearing one or more mutations to be introduced into the cloned DNA are synthesized and inserted into the cloned DNA to be mutagenized (e.g., a fatty aldehyde biosynthetic polynucleotide sequence). Clones containing the mutagenized DNA are recovered, and the activities of the polypeptides they encode are assessed.

[0202] Another method for generating variants is assembly PCR. Assembly PCR involves the assembly of a PCR product from a mixture of small DNA fragments. A large number of different PCR reactions occur in parallel in the same vial, with the products of one reaction priming the products of another reaction. Assembly PCR is described in, for example, U.S. Pat. No. 5,965,408.

[0203] Still another method of generating variants is sexual PCR mutagenesis. In sexual PCR mutagenesis, forced homologous recombination occurs between DNA molecules of different, but highly related, DNA sequence in vitro as a result of random fragmentation of the DNA molecule based on sequence homology. This is followed by fixation of the crossover by primer extension in a PCR reaction. Sexual PCR mutagenesis is described in, for example, Stemmer, PNAS, USA 91:10747-10751, 1994.

[0204] Recursive ensemble mutagenesis can also be used to generate variants. Recursive ensemble mutagenesis is an algorithm for protein engineering (i.e., protein mutagenesis) developed to produce diverse populations of phenotypically related mutants whose members differ in amino acid sequence. This method uses a feedback mechanism to control successive rounds of combinatorial cassette mutagenesis. Recursive ensemble mutagenesis is described in, for example, Arkin et al., PNAS, USA 89:7811-7815, 1992.

[0205] In some embodiments, variants are created using exponential ensemble mutagenesis. Exponential ensemble mutagenesis is a process for generating combinatorial libraries with a high percentage of unique and functional mutants, wherein small groups of residues are randomized in parallel to identify, at each altered position, amino acids which lead to functional proteins. Exponential ensemble mutagenesis is described in, for example, Delegrave et al., Biotech. Res. 11:1548-1552, 1993. Random and site-directed mutageneses are described in, for example, Arnold, Curr. Opin. Biotech. 4:450-455, 1993.

[0206] In some embodiments, variants are created using shuffling procedures wherein portions of a plurality of nucleic acids that encode distinct polypeptides are fused together to create chimeric nucleic acid sequences that encode chimeric polypeptides as described in, for example, U.S. Pat. Nos. 5,965,408 and 5,939,250.

[0207] Polynucleotide variants also include nucleic acid analogs. Nucleic acid analogs can be modified at the base moiety, sugar moiety, or phosphate backbone to improve, for example, stability, hybridization, or solubility of the nucleic acid. Modifications at the base moiety include deoxyuridine for deoxythymidine and 5-methyl-2′-deoxycytidine or 5-bromo-2′-doxycytidine for deoxycytidine. Modifications of the sugar moiety include modification of the 2′ hydroxyl of the ribose sugar to form 2′-O-methyl or 2′-O-allyl sugars. The deoxyribose phosphate backbone can be modified to produce morpholino nucleic acids, in which each base moiety is linked to a six-membered, morpholino ring, or peptide nucleic acids, in which the deoxyphosphate backbone is replaced by a pseudopeptide backbone and the four bases are retained. (See, e.g., Summerton et al., Antisense Nucleic Acid Drug Dev. (1997) 7:187-195; and Hyrup et al., Bioorgan. Med. Chem. (1996) 4:5-23.) In addition, the deoxyphosphate backbone can be replaced with, for example, a phosphorothioate or phosphorodithioate backbone, a phosphoroamidite, or an alkyl phosphotriester backbone.

[0208] Biosynthetic polypeptide variants can be variants in which one or more amino acid residues are substituted with a conserved or non-conserved amino acid residues. In preferred embodiments, biosynthetic polypeptide variants are variants in which one or more amino acid residues are substituted with a conserved amino acid residue. Such substituted amino acid residue may or may not be one encoded by a genetic code.

[0209] Conservative substitutions are those that substitute a given amino acid in a polypeptide by another amino acid of similar characteristics. Typical conservative substitutions are the following replacements: replacement of an aliphatic amino acid, such as alanine, valine, leucine, and isoleucine, with another aliphatic amino acid; replacement of a serine with a threonine or vice versa; replacement of an acidic residue, such as aspartic acid and glutamic acid, with another acidic residue; replacement of a residue bearing an amide group, such as asparagine and glutamine, with another residue bearing an amide group; exchange of a basic residue, such as lysine and arginine, with another basic residue; and replacement of an aromatic residue, such as phenylalanine and tyrosine, with another aromatic residue.

[0210] Other polypeptide variants are those in which one or more amino acid residues include a substituent group. Still other polypeptide variants are those in which the polypeptide is associated with another compound, such as a compound to increase the half-life of the polypeptide (e.g., polyethylene glycol).

[0211] Additional polypeptide variants are those in which additional amino acids are fused to the polypeptide, such as a leader sequence, a secretory sequence, a proprotein sequence, or a sequence which facilitates purification, enrichment, or stabilization of the polypeptide.

[0212] In some instances, the polypeptide variants retain the same biological function as a the native polypeptide, for example, retain fatty alcohol biosynthetic activity, such as fatty aldehyde reductase, alcohol dehydrogenase, aldo-keto reductase, short-chain alcohol dehydrogenases, or oxidoreductase activity or retain fatty aldehyde biosynthetic activity, such as carboxylic acid or fatty acid reductase activity, and have amino acid sequences substantially identical thereto.

[0213] In other instances, the polypeptide variants have at least about 50%, at least about 55%, at least about 60%, at least about 65%, at least about 70%, at least about 75%, at least about 80%, at least about 85%, at least about 90%, at least about 91%, at least about 92%, at least about 93%, at least about 94%, at least about 95%, or more than about 95% homology to the native or wild-type sequence. In another embodiment, the polypeptide variants include a fragment comprising at least about 5, 10, 15, 20, 25, 30, 35, 40, 50, 75, 100, or 150 consecutive amino acids thereof.

[0214] The polypeptide variants or fragments thereof can be obtained by isolating nucleic acids encoding them using techniques described herein or by expressing synthetic nucleic acids encoding them. Alternatively, polypeptide variants or fragments thereof can be obtained through biochemical enrichment or purification procedures. The sequence of polypeptide variants or fragments can be determined by proteolytic digestion, gel electrophoresis, and/or microsequencing. The sequence of the polypeptide variants or fragments can then be compared to the native or wild-type sequence using any of the programs described herein.

[0215] The polypeptide variants and fragments thereof can be assayed for fatty aldehydes producing activity, fatty alcohol producing activity or hydrocarbon producing activity using routine methods. For example, the polypeptide variants or fragment can be contacted with a substrate (e.g., a fatty acid or fatty aldehyde substrate) under conditions that allow the polypeptide variant to function. A decreased in the level of the substrate or an increase in the level of a fatty aldehydes, fatty alcohol or hydrocarbon, respectively, can be measured to determine the biological activity of the variant or fragment.

[0216] The terms “homolog,” “homologue,” and “homologous” as used herein refer to a polynucleotide or a polypeptide comprising a sequence that is at least about 80% homologous to the corresponding polynucleotide or polypeptide sequence. One of ordinary skill in the art is well aware of methods to determine homology between two or more sequences. Briefly, calculations of “homology” between two sequences can be performed as follows. The sequences are aligned for optimal comparison purposes (e.g., gaps can be introduced in one or both of a first and a second amino acid or nucleic acid sequence for optimal alignment and non-homologous sequences can be disregarded for comparison purposes). In a preferred embodiment, the length of a first sequence that is aligned for comparison purposes is at least about 30%, preferably at least about 40%, more preferably at least about 50%, even more preferably at least about 60%, and even more preferably at least about 70%, at least about 80%, at least about 90%, or about 100% of the length of a second sequence. The amino acid residues or nucleotides at corresponding amino acid positions or nucleotide positions of the first and second sequences are then compared. When a position in the first sequence is occupied by the same amino acid residue or nucleotide as the corresponding position in the second sequence, then the molecules are identical at that position (as used herein, amino acid or nucleic acid “identity” is equivalent to amino acid or nucleic acid “homology”). The percent identity between the two sequences is a function of the number of identical positions shared by the sequences, taking into account the number of gaps and the length of each gap, which need to be introduced for optimal alignment of the two sequences.

[0217] The comparison of sequences and determination of percent homology between two sequences can be accomplished using a mathematical algorithm, such as BLAST (Altschul et al., J. Mol. Biol., 215(3): 403-410 (1990)). The percent homology between two amino acid sequences also can be determined using the Needleman and Wunsch algorithm that has been incorporated into the GAP program in the GCG software package, using either a Blossum 62 matrix or a PAM250 matrix, and a gap weight of 16, 14, 12, 10, 8, 6, or 4 and a length weight of 1, 2, 3, 4, 5, or 6 (Needleman and Wunsch, J. Mol. Biol., 48: 444-453 (1970)). The percent homology between two nucleotide sequences also can be determined using the GAP program in the GCG software package, using a NWSgapdna.CMP matrix and a gap weight of 40, 50, 60, 70, or 80 and a length weight of 1, 2, 3, 4, 5, or 6. One of ordinary skill in the art can perform initial homology calculations and adjust the algorithm parameters accordingly. A preferred set of parameters (and the one that should be used if a practitioner is uncertain about which parameters should be applied to determine if a molecule is within a homology limitation of the claims) are a Blossum 62 scoring matrix with a gap penalty of 12, a gap extend penalty of 4, and a frameshift gap penalty of 5. Additional methods of sequence alignment are known in the biotechnology arts (see, e.g., Rosenberg, BMC Bioinformatics, 6: 278 (2005); Altschul et al., FEBS J., 272(20): 5101-5109 (2005)).

[0218] As used herein, the term “hybridizes under low stringency, medium stringency, high stringency, or very high stringency conditions” describes conditions for hybridization and washing. Guidance for performing hybridization reactions can be found in Current Protocols in Molecular Biology, John Wiley & Sons, N.Y. (1989), 6.3.1-6.3.6. Aqueous and nonaqueous methods are described in that reference and either method can be used. Specific hybridization conditions referred to herein are as follows: 1) low stringency hybridization conditions in 6× sodium chloride/sodium citrate (SSC) at about 45° C., followed by two washes in 0.2×SSC, 0.1% SDS at least at 50° C. (the temperature of the washes can be increased to 55° C. for low stringency conditions); 2) medium stringency hybridization conditions in 6×SSC at about 45° C., followed by one or more washes in 0.2×SSC, 0.1% SDS at 60° C.; 3) high stringency hybridization conditions in 6×SSC at about 45° C., followed by one or more washes in 0.2.×SSC, 0.1% SDS at 65° C.; and preferably 4) very high stringency hybridization conditions are 0.5M sodium phosphate, 7% SDS at 65° C., followed by one or more washes at 0.2×SSC, 1% SDS at 65° C. Very high stringency conditions (4) are the preferred conditions unless otherwise specified.

[0219] In some embodiments, the polypeptide is a fragment of any of the polypeptides described herein. The term “fragment” refers to a shorter portion of a full-length polypeptide or protein ranging in size from four amino acid residues to the entire amino acid sequence minus one amino acid residue. In certain embodiments of the invention, a fragment refers to the entire amino acid sequence of a domain of a polypeptide or protein (e.g., a substrate binding domain or a catalytic domain).

[0220] In some embodiments, the polypeptide is a mutant or a variant of any of the polypeptides described herein. The terms “mutant” and “variant” as used herein refer to a polypeptide having an amino acid sequence that differs from a wild-type polypeptide by at least one amino acid. For example, the mutant or variant can comprise one or more of the following conservative amino acid substitutions: replacement of an aliphatic amino acid, such as alanine, valine, leucine, and isoleucine, with another aliphatic amino acid; replacement of a serine with a threonine; replacement of a threonine with a serine; replacement of an acidic residue, such as aspartic acid and glutamic acid, with another acidic residue; replacement of a residue bearing an amide group, such as asparagine and glutamine, with another residue bearing an amide group; exchange of a basic residue, such as lysine and arginine, with another basic residue; and replacement of an aromatic residue, such as phenylalanine and tyrosine, with another aromatic residue. In some embodiments, the mutant polypeptide has about 1, 2, 3, 4, 5, 6, 7, 8, 9, 10, 15, 20, 30, 40, 50, 60, 70, 80, 90, 100, or more amino acid substitutions, additions, insertions, or deletions.

[0221] Preferred fragments or mutants of a polypeptide retain some or all of the biological function (e.g., enzymatic activity) of the corresponding wild-type polypeptide. In some embodiments, the fragment or mutant retains at least 75%, at least 80%, at least 90%, at least 95%, or at least 98% or more of the biological function of the corresponding wild-type polypeptide. In other embodiments, the fragment or mutant retains about 100% of the biological function of the corresponding wild-type polypeptide. Guidance in determining which amino acid residues may be substituted, inserted, or deleted without affecting biological activity may be found using computer programs well known in the art, for example, LASERGENE™ software (DNASTAR, Inc., Madison, Wis.).

[0222] In yet other embodiments, a fragment or mutant exhibits increased biological function as compared to a corresponding wild-type polypeptide. For example, a fragment or mutant may display at least a 10%, at least a 25%, at least a 50%, at least a 75%, or at least a 90% improvement in enzymatic activity as compared to the corresponding wild-type polypeptide. In other embodiments, the fragment or mutant displays at least 100% (e.g., at least 200%, or at least 500%) improvement in enzymatic activity as compared to the corresponding wild-type polypeptide.

[0223] It is understood that the polypeptides described herein may have additional conservative or non-essential amino acid substitutions, which do not have a substantial effect on the polypeptide function. Whether or not a particular substitution will be tolerated (i.e., will not adversely affect desired biological function, such as DNA binding or enzyme activity) can be determined as described in Bowie et al. (Science, 247: 1306-1310 (1990)).

[0224] A “conservative amino acid substitution” is one in which the amino acid residue is replaced with an amino acid residue having a similar side chain. Families of amino acid residues having similar side chains have been defined in the art. These families include amino acids with basic side chains (e.g., lysine, arginine, histidine), acidic side chains (e.g., aspartic acid, glutamic acid), uncharged polar side chains (e.g., glycine, asparagine, glutamine, serine, threonine, tyrosine, cysteine), nonpolar side chains (e.g., alanine, valine, leucine, isoleucine, proline, phenylalanine, methionine, tryptophan), beta-branched side chains (e.g., threonine, valine, isoleucine), and aromatic side chains (e.g., tyrosine, phenylalanine, tryptophan, histidine).

[0225] In some embodiments, the fatty acid or fatty acid derivative biosynthetic polypeptide or polynucleotide is from a bacterium, a cyanobacterium, an algae, a plant, an insect, a yeast, a fungus, or a mammal. In certain embodiments, the polypeptide is from a mammalian cell, plant cell, insect cell, fungus cell, cyanobacterial cell, algal cell, bacterial cell, or any other organisms described herein.

### Vectors and Expression

[0226] In some embodiments, a polynucleotide (or gene) sequence is provided to the host cell by way of a recombinant vector, which comprises a promoter operably linked to the polynucleotide sequence. In certain embodiments, the promoter is a developmentally-regulated, an organelle-specific, a tissue-specific, an inducible, a constitutive, or a cell-specific promoter.

[0227] In some embodiments, the recombinant vector comprises at least one sequence selected from the group consisting of (a) an expression control sequence operatively coupled to the polynucleotide sequence; (b) a selection marker operatively coupled to the polynucleotide sequence; (c) a marker sequence operatively coupled to the polynucleotide sequence; (d) a purification moiety operatively coupled to the polynucleotide sequence; (e) a secretion sequence operatively coupled to the polynucleotide sequence; and (f) a targeting sequence operatively coupled to the polynucleotide sequence.

[0228] The expression vectors described herein include a polynucleotide sequence described herein in a form suitable for expression of the polynucleotide sequence in a host cell. It will be appreciated by those skilled in the art that the design of the expression vector can depend on such factors as the choice of the host cell to be transformed, the level of expression of polypeptide desired, etc. The expression vectors described herein can be introduced into host cells to produce polypeptides, including fusion polypeptides, encoded by the polynucleotide sequences as described herein.

[0229] Expression of genes encoding polypeptides in prokaryotes, for example, E. coli, is most often carried out with vectors containing constitutive or inducible promoters directing the expression of either fusion or non-fusion polypeptides. Fusion vectors add a number of amino acids to a polypeptide encoded therein, usually to the amino- or carboxy-terminus of the recombinant polypeptide. Such fusion vectors typically serve one or more of the following three purposes: (1) to increase expression of the recombinant polypeptide; (2) to increase the solubility of the recombinant polypeptide; and (3) to aid in the purification of the recombinant polypeptide by acting as a ligand in affinity purification. Often, in fusion expression vectors, a proteolytic cleavage site is introduced at the junction of the fusion moiety and the recombinant polypeptide. This enables separation of the recombinant polypeptide from the fusion moiety after purification of the fusion polypeptide. Examples of such enzymes, and their cognate recognition sequences, include Factor Xa, thrombin, and enterokinase. Exemplary fusion expression vectors include pGEX (Pharmacia Biotech, Inc., Piscataway, N.J.; Smith et al., Gene, 67: 31-40 (1988)), pMAL (New England Biolabs, Beverly, Mass.), and pRITS (Pharmacia Biotech, Inc., Piscataway, N.J.), which fuse glutathione S-transferase (GST), maltose E binding protein, or protein A, respectively, to the target recombinant polypeptide.

[0230] Examples of inducible, non-fusion E. coli expression vectors include pTrc (Amann et al., Gene (1988) 69:301-315) and pET 11d (Studier et al., Gene Expression Technology: Methods in Enzymology 185, Academic Press, San Diego, Calif. (1990) 60-89). Target gene expression from the pTrc vector relies on host RNA polymerase transcription from a hybrid trp-lac fusion promoter. Target gene expression from the pET 11d vector relies on transcription from a T7 gn10-lac fusion promoter mediated by a coexpressed viral RNA polymerase (T7 gn1). This viral polymerase is supplied by host strains BL21(DE3) or HMS174(DE3) from a resident λ prophage harboring a T7 gn1 gene under the transcriptional control of the lacUV 5 promoter.

[0231] Suitable expression systems for both prokaryotic and eukaryotic cells are well known in the art; see, e.g., Sambrook et al., “Molecular Cloning: A Laboratory Manual,” second edition, Cold Spring Harbor Laboratory, (1989). Examples of inducible, non-fusion E. coli expression vectors include pTrc (Amann et al., Gene, 69: 301-315 (1988)) and PET 11d (Studier et al., Gene Expression Technology Methods in Enzymology 185, Academic Press, San Diego, Calif., pp. 60-89 (1990)). In certain embodiments, a polynucleotide sequence of the invention is operably linked to a promoter derived from bacteriophage T5.

[0232] In another embodiment, the host cell is a yeast cell. In this embodiment, the expression vector is a yeast expression vector. Examples of vectors for expression in yeast include pYepSec1 (Baldari et al., EMBO J., 6: 229-234 (1987)), pMFa (Kurjan et al., Cell, 30: 933-943 (1982)), pJRY88 (Schultz et al., Gene, 54: 113-123 (1987)), pYES2 (Invitrogen Corp., San Diego, Calif.), and picZ (Invitrogen Corp., San Diego, Calif.).

[0233] Alternatively, a polypeptide described herein can be expressed in insect cells using baculovirus expression vectors. Baculovirus vectors available for expression of proteins in cultured insect cells (e.g., Sf9 cells) include, for example, the pAc series (Smith et al., Mol. Cell. Biol. (1983) 3:2156-2165) and the pVL series (Lucklow et al., Virology (1989) 170:31-39).

[0234] In yet another embodiment, the nucleic acids described herein can be expressed in mammalian cells using a mammalian expression vector. Examples of mammalian expression vectors include pCDM8 (Seed, Nature (1987) 329:840) and pMT2PC (Kaufman et al., EMBO J. (1987) 6:187-195). When used in mammalian cells, the expression vector's control functions can be provided by viral regulatory elements. For example, commonly used promoters are derived from polyoma, Adenovirus 2, cytomegalovirus, and Simian Virus 40. Other suitable expression systems for both prokaryotic and eukaryotic cells are described in chapters 16 and 17 of Sambrook et al., eds., Molecular Cloning: A Laboratory Manual. 2nd, ed., Cold Spring Harbor Laboratory, Cold Spring Harbor Laboratory Press, Cold Spring Harbor, N.Y., 1989.

[0235] Vectors can be introduced into prokaryotic or eukaryotic cells via a variety of art-recognized techniques for introducing foreign nucleic acid (e.g., DNA) into a host cell. Suitable methods for transforming or transfecting host cells can be found in, for example, Sambrook et al. (supra).

[0236] For stable transformation of bacterial cells, it is known that, depending upon the expression vector and transformation technique used, only a small fraction of cells will take-up and replicate the expression vector. In order to identify and select these transformants, a gene that encodes a selectable marker (e.g., resistance to an antibiotic) can be introduced into the host cells along with the gene of interest. Selectable markers include those that confer resistance to drugs such as, but not limited to, ampicillin, kanamycin, chloramphenicol, or tetracycline. Nucleic acids encoding a selectable marker can be introduced into a host cell on the same vector as that encoding a polypeptide described herein or can be introduced on a separate vector. Cells stably transformed with the introduced nucleic acid can be identified by growth in the presence of an appropriate selection drug.

[0237] Similarly, for stable transfection of mammalian cells, it is known that, depending upon the expression vector and transfection technique used, only a small fraction of cells may integrate the foreign DNA into their genome. In order to identify and select these integrants, a gene that encodes a selectable marker (e.g., resistance to an antibiotic) can be introduced into the host cells along with the gene of interest. Preferred selectable markers include those which confer resistance to drugs, such as G418, hygromycin, and methotrexate. Nucleic acids encoding a selectable marker can be introduced into a host cell on the same vector as that encoding a polypeptide described herein or can be introduced on a separate vector. Cells stably transfected with the introduced nucleic acid can be identified by growth in the presence of an appropriate selection drug.

### Host Cells

[0238] As used herein, a “host cell” is a cell used to produce a product described herein (e.g., a fatty aldehydes, a fatty alcohol or a hydrocarbon).

[0239] A host cell is referred to as an “engineered host cell” or a “recombinant host cell” if the expression of one or more polynucleotides or polypeptides in the host cell are altered or modified as compared to their expression in a corresponding wild-type host cell under the same conditions.

[0240] In any of the aspects of the invention described herein, the host cell can be selected from the group consisting of a eukaryotic plant, algae, cyanobacterium, green-sulfur bacterium, green non-sulfur bacterium, purple sulfur bacterium, purple non-sulfur bacterium, extremophile, yeast, fungus, engineered organisms thereof, or a synthetic organism. In some embodiments, the host cell is light dependent or fixes carbon. In some embodiments, the host cell is light dependent or fixes carbon. In some embodiments, the host cell has autotrophic activity.

[0241] Various host cells can be used to produce fatty aldehydes, fatty alcohols and hydrocarbons, as described herein. A host cell can be any prokaryotic or eukaryotic cell. For example, a gene encoding a polypeptide described herein (e.g., a fatty aldehyde biosynthetic polypeptide, or an acyl-ACP reductase polypeptide, and/or a fatty alcohol biosynthetic polypeptide) can be expressed in bacterial cells (such as E. coli), insect cells, yeast, or mammalian cells (such as Chinese hamster ovary cells (CHO) cells, COS cells, VERO cells, BHK cells, HeLa cells, Cv1 cells, MDCK cells, 293 cells, 3T3 cells, or PC12 cells).

[0242] Exemplary host cells can be from the genus Escherichia, Bacillus, Lactobacillus, Rhodococcus, Pseudomonas, Aspergillus, Trichoderma, Neurospora, Fusarium, Humicola, Rhizomucor, Kluyveromyces, Pichia, Mucor, Myceliophtora, Penicillium, Phanerochaete, Pleurotus, Trametes, Chrysosporium, Saccharomyces, Schizosaccharomyces, Yarrowia, or Streptomyces.

[0243] In some embodiments, the host cell is a Gram-positive bacterial cell. In other embodiments, the host cell is a Gram-negative bacterial cell.

[0244] In some embodiments, the host cell is selected from the genus Escherichia, Bacillus, Lactobacillus, Rhodococcus, Pseudomonas, Aspergillus, Trichoderma, Neurospora, Fusarium, Humicola, Rhizomucor, Kluyveromyces, Pichia, Mucor, Myceliophtora, Penicillium, Phanerochaete, Pleurotus, Trametes, Chrysosporium, Saccharomyces, Stenotrophamonas, Schizosaccharomyces, Yarrowia, or Streptomyces.

[0245] In certain embodiments, the host cell is a Bacillus lentus cell, a Bacillus brevis cell, a Bacillus stearothermophilus cell, a Bacillus licheniformis cell, a Bacillus alkalophilus cell, a Bacillus coagulans cell, a Bacillus circulans cell, a Bacillus pumilis cell, a Bacillus thuringiensis cell, a Bacillus clausii cell, a Bacillus megaterium cell, a Bacillus subtilis cell, or a Bacillus amyloliquefaciens cell.

[0246] In other embodiments, the host cell is a Trichoderma koningii cell, a Trichoderma viride cell, a Trichoderma reesei cell, a Trichoderma longibrachiatum cell, an Aspergillus awamori cell, an Aspergillus fumigates cell, an Aspergillus foetidus cell, an Aspergillus nidulans cell, an Aspergillus niger cell, an Aspergillus oryzae cell, a Humicola insolens cell, a Humicola lanuginose cell, a Rhodococcus opacus cell, a Rhizomucor miehei cell, or a Mucor michei cell.

[0247] In yet other embodiments, the host cell is a Streptomyces lividans cell or a Streptomyces murinus cell.

[0248] In yet other embodiments, the host cell is an Actinomycetes cell.

[0249] In some embodiments, the host cell is a Saccharomyces cerevisiae cell.

[0250] Additional host cells that can be used in the methods described herein are described in WO2009/111513 and WO2009/111672.

### Transport Proteins

[0251] Transport proteins can export polypeptides and organic compounds (e.g., fatty alcohols) out of a host cell. Many transport and efflux proteins serve to excrete a wide variety of compounds and can be naturally modified to be selective for particular types of hydrocarbons.

[0252] Non-limiting examples of suitable transport proteins are ATP-Binding Cassette (ABC) transport proteins, efflux proteins, and fatty acid transporter proteins (FATP). Additional non-limiting examples of suitable transport proteins include the ABC transport proteins from organisms such as Caenorhabditis elegans, Arabidopsis thalania, Alkaligenes eutrophus, and Rhodococcus erythropolis. Exemplary ABC transport proteins include, without limitation, CER5 [Accession No: At1g 51510, AY734542, At3g 2190, or At1g51460], AtMRP5 [Accession No. NP_{—}171908], AmiS2 [Accession No: JC5491], and AtPGP1 [Accession No: NP_{—}181228]. Host cells can also be chosen for their endogenous ability to secrete organic compounds. The efficiency of organic compound production and secretion into the host cell environment (e.g., culture medium, fermentation broth) can be expressed as a ratio of intracellular product to extracellular product. In some examples, the ratio can be about 5:1, 4:1, 3:1, 2:1, 1:1, 1:2, 1:3, 1:4, or 1:5.

### Fermentation

[0253] The production and isolation of fatty alcohols can be enhanced by employing beneficial fermentation techniques. One method for maximizing production while reducing costs is increasing the percentage of the carbon source that is converted to hydrocarbon products.

[0254] During normal cellular lifecycles, carbon is used in cellular functions, such as producing lipids, saccharides, proteins, organic acids, and nucleic acids. Reducing the amount of carbon necessary for growth-related activities can increase the efficiency of carbon source conversion to product. This can be achieved by, for example, first growing host cells to a desired density (for example, a density achieved at the peak of the log phase of growth). At such a point, replication checkpoint genes can be harnessed to stop the growth of cells. Specifically, quorum sensing mechanisms (reviewed in Camilli et al., Science 311:1113, 2006; Venturi FEMS Microbio. Rev. 30:274-291, 2006; and Reading et al., FEMS Microbiol. Lett. 254:1-11, 2006) can be used to activate checkpoint genes, such as p. 5.3, p21, or other checkpoint genes.

[0255] Genes that can be activated to stop cell replication and growth in E. coli include umuDC genes. The overexpression of umuDC genes stops the progression from stationary phase to exponential growth (Murli et al., J. of Bact. 182:1127, 2000). UmuC is a DNA polymerase that can carry out translesion synthesis over non-coding lesions—the mechanistic basis of most UV and chemical mutagenesis. The umuDC gene products are involved in the process of translesion synthesis and also serve as a DNA sequence damage checkpoint. The umuDC gene products include UmuC, UmuD, umuD′, UmuD′₂C, UmuD′₂, and UmuD₂. Simultaneously, product-producing genes can be activated, thus minimizing the need for replication and maintenance pathways to be used while a fatty aldehyde is being made. Host cells can also be engineered to express umuC and umuD from E. coli in pBAD24 under the prpBCDE promoter system through de novo synthesis of this gene with the appropriate end-product production genes.

[0256] The percentage of input carbons converted to fatty alcohols can be a cost driver. The more efficient the process is (i.e., the higher the percentage of input carbons converted to fatty alcohols), the less expensive the process will be. For oxygen-containing carbon sources (e.g., glucose and other carbohydrate based sources), the oxygen must be released in the form of carbon dioxide. For every 2 oxygen atoms released, a carbon atom is also released leading to a maximal theoretical metabolic efficiency of approximately 34% (w/w) (for fatty acid derived products). This figure, however, changes for other organic compounds and carbon sources. Typical efficiencies in the literature are approximately less than 5%. Host cells engineered to produce fatty alcohols can have greater than about 1, 3, 5, 10, 15, 20, 25, and 30% efficiency. In one example, host cells can exhibit an efficiency of about 10% to about 25%. In other examples, such host cells can exhibit an efficiency of about 25% to about 30%. In other examples, host cells can exhibit greater than 30% efficiency.

[0257] The host cell can be additionally engineered to express recombinant cellulosomes, such as those described in PCT application number PCT/US2007/003736. These cellulosomes can allow the host cell to use cellulosic material as a carbon source. For example, the host cell can be additionally engineered to express invertases (EC 3.2.1.26) so that sucrose can be used as a carbon source. Similarly, the host cell can be engineered using the teachings described in U.S. Pat. Nos. 5,000,000; 5,028,539; 5,424,202; 5,482,846; and 5,602,030; so that the host cell can assimilate carbon efficiently and use cellulosic materials as carbon sources.

[0258] In one example, the fermentation chamber can enclose a fermentation that is undergoing a continuous reduction. In this instance, a stable reductive environment can be created. The electron balance can be maintained by the release of carbon dioxide (in gaseous form). Efforts to augment the NAD/H and NADP/H balance can also facilitate in stabilizing the electron balance. The availability of intracellular NADPH can also be enhanced by engineering the host cell to express an NADH:NADPH transhydrogenase. The expression of one or more NADH:NADPH transhydrogenases converts the NADH produced in glycolysis to NADPH, which can enhance the production of fatty alcohols.

[0259] For small scale production, the engineered host cells can be grown in batches of, for example, about 100 mL, 500 mL, 1 L, 2 L, 5 L, or 10 L; fermented; and induced to express desired fatty aldehyde biosynthetic genes and/or an alcohol dehydrogenase genes based on the specific genes encoded in the appropriate plasmids. For large scale production, the engineered host cells can be grown in batches of about 10 L, 100 L, 1000 L, 10,000 L, 100,000 L, 1,000,000 L or larger; fermented; and induced to express desired fatty aldehyde biosynthetic genes and/or alcohol dehydrogenase genes based on the specific genes encoded in the appropriate plasmids or incorporated into the host cell's genome.

[0260] For example, a suitable production host, such as E. coli cells, harboring plasmids containing the desired genes or having the genes integrated in its chromosome can be incubated in a suitable reactor, for example a 1 L reactor, for 20 hours at 37° C. in M9 medium supplemented with 2% glucose, carbenicillin, and chloramphenicol. When the OD₆₀₀ of the culture reaches 0.9, the production host can be induced with IPTG alcohol. After incubation, the spent media can be extracted and the organic phase can be examined for the presence of fatty alcohols using GC-MS.

[0261] In some instances, after the first hour of induction, aliquots of no more than about 10% of the total cell volume can be removed each hour and allowed to sit without agitation to allow the fatty alcohols to rise to the surface and undergo a spontaneous phase separation or precipitation. The fatty alcohol component can then be collected, and the aqueous phase returned to the reaction chamber. The reaction chamber can be operated continuously. When the OD₆₀₀ drops below 0.6, the cells can be replaced with a new batch grown from a seed culture.

### Producing Fatty Alcohols Using Cell-Free Methods

[0262] In some methods described herein, a fatty alcohol can be produced using a purified polypeptide (e.g., a fatty alcohol biosynthetic polypeptide) described herein and a substrate (e.g., fatty aldehyde), produced, for example, by a method described herein. For example, a host cell can be engineered to express a fatty alcohol biosynthetic polypeptide or variant as described herein. The host cell can be cultured under conditions suitable to allow expression of the polypeptide. Cell free extracts can then be generated using known methods. For example, the host cells can be lysed using detergents or by sonication. The expressed polypeptides can be purified using known methods. After obtaining the cell free extracts, substrates described herein can be added to the cell free extracts and maintained under conditions to allow conversion of the substrates (e.g., fatty aldehydes) to fatty alcohols. The fatty alcohols can then be separated and purified using known techniques.

[0263] In some instances, a fatty aldehyde can be converted into a fatty alcohol by contacting the fatty aldehyde with a fatty alcohol biosynthetic polypeptide provided herein, or a variant thereof. In other instances, a fatty aldehyde can be converted into a fatty alcohol by contacting the fatty aldehyde with a fatty alcohol biosynthetic polypeptide that is an AdhP homolog of FIG. 2, a DkgA homolog of FIG. 3, a DkgB homolog of FIG. 4, a Tas homolog of FIG. 5, an RspB homolog of FIG. 6, a YahK homolog of FIG. 7, a YbbO homolog of FIG. 8, a YbdH homolog of FIG. 9, a YbdR homolog of FIG. 10, a YgfF homolog of FIG. 11, a YhdH homolog of FIG. 12, a YjgB homolog of FIG. 13, an AroB homolog of FIG. 14, a YcjQ homolog of FIG. 15, a YdbC homolog of FIG. 16, a YdjG homolog of FIG. 17, a YeaE homolog of FIG. 18, a YncB homolog of FIG. 19, a YqhD homolog of FIG. 20, a YdjL homolog of FIG. 21, or a variant thereof.

### Post-Production Processing

[0264] The fatty alcohols produced during fermentation can be separated from the fermentation media. Any known technique for separating fatty alcohols from aqueous media can be used. One exemplary separation process is a two phase (bi-phasic) separation process. This process involves fermenting the genetically engineered host cells under conditions sufficient to produce fatty alcohols, allowing the fatty alcohol to collect in an organic phase, and separating the organic phase from the aqueous fermentation broth. This method can be practiced in both a batch and continuous fermentation processes.

[0265] Bi-phasic separation uses the relative immiscibility of fatty alcohols to facilitate separation. Immiscible refers to the relative inability of a compound to dissolve in water and is defined by the compound's partition coefficient. One of ordinary skill in the art will appreciate that by choosing a fermentation broth and organic phase, such that the fatty alcohol being produced has a high logP value, the fatty alcohol can separate into the organic phase, even at very low concentrations, in the fermentation vessel.

[0266] The fatty alcohols produced by the methods described herein can be relatively immiscible in the fermentation broth, as well as in the cytoplasm. Therefore, the fatty alcohol can collect in an organic phase either intracellularly or extracellularly. The collection of the products in the organic phase can lessen the impact of the fatty alcohol on cellular function and can allow the host cell to produce more product.

[0267] The methods described herein can result in the production of homogeneous compounds wherein at least about 60%, 70%, 80%, 90%, or 95% of the fatty alcohols produced will have carbon chain lengths that vary by less than about 6 carbons, less than about 4 carbons, or less than about 2 carbons. These compounds can also be produced with a relatively uniform degree of saturation. These compounds can be used directly as fuels, fuel additives, starting materials for production of other chemical compounds (e.g., polymers, surfactants, plastics, textiles, solvents, adhesives, etc.), or personal care additives. These compounds can also be used as feedstock for subsequent reactions, for example, hydrogenation, catalytic cracking (e.g., via hydrogenation, pyrolisis, or both), to make other products.

[0268] In some embodiments, the fatty alcohols produced using methods described herein can contain between about 50% and about 90% carbon; or between about 5% and about 25% hydrogen. In other embodiments, the fatty alcohols produced using methods described herein can contain between about 65% and about 85% carbon; or between about 10% and about 15% hydrogen.

[0269] In some embodiments, the host cell is a Gram-positive bacterial cell. In other embodiments, the host cell is a Gram-negative bacterial cell.

[0270] In some embodiments, the host cell is selected from the genus Escherichia, Bacillus, Lactobacillus, Rhodococcus, Pseudomonas, Aspergillus, Trichoderma, Neurospora, Fusarium, Humicola, Rhizomucor, Kluyveromyces, Pichia, Mucor, Myceliophtora, Penicillium, Phanerochaete, Pleurotus, Trametes, Chrysosporium, Saccharomyces, Stenotrophamonas, Schizosaccharomyces, Yarrowia, or Streptomyces.

[0271] In other embodiments, the host cell is a Bacillus lentus cell, a Bacillus brevis cell, a Bacillus stearothermophilus cell, a Bacillus lichen formis cell, a Bacillus alkalophilus cell, a Bacillus coagulans cell, a Bacillus circulans cell, a Bacillus pumilis cell, a Bacillus thuringiensis cell, a Bacillus clausii cell, a Bacillus megaterium cell, a Bacillus subtilis cell, or a Bacillus amyloliquefaciens cell.

[0272] In other embodiments, the host cell is a Trichoderma koningii cell, a Trichoderma viride cell, a Trichoderma reesei cell, a Trichoderma longibrachiatum cell, an Aspergillus awamori cell, an Aspergillus fumigates cell, an Aspergillus foetidus cell, an Aspergillus nidulans cell, an Aspergillus niger cell, an Aspergillus oryzae cell, a Humicola insolens cell, a Humicola lanuginose cell, a Rhodococcus opacus cell, a Rhizomucor miehei cell, or a Mucor michei cell.

[0273] In yet other embodiments, the host cell is a Streptomyces lividans cell or a Streptomyces murinus cell.

[0274] In yet other embodiments, the host cell is an Actinomycetes cell.

[0275] In some embodiments, the host cell is a Saccharomyces cerevisiae cell. In some embodiments, the host cell is a Saccharomyces cerevisiae cell.

[0276] In still other embodiments, the host cell is a CHO cell, a COS cell, a VERO cell, a BHK cell, a HeLa cell, a Cvl cell, an MDCK cell, a 293 cell, a 3T3 cell, or a PC12 cell.

[0277] In other embodiments, the host cell is a cell from an eukaryotic plant, algae, cyanolacterium, green-sulfur bacterium, green non-sulfur bacterium, purple sulfur bacterium, purple non-sulfur bacterium, extremophile, yeast, fungus, an engineered organism thereof, or a synthetic organism. In some embodiments, the host cell is light-dependent or fixes carbon. In some embodiments, the host cell is light-dependent or fixes carbon. In some embodiments, the host cell has autotrophic activity. In some embodiments, the host cell has photoautotrophic activity, such as in the presence of light. In some embodiments, the host cell is heterotrophic or mixotrophic in the absence of light. In certain embodiments, the host cell is a cell from Avabidopsis thaliana, Panicum virgatum, Miscanthus giganteus, Zea mays, Botryococcuse braunii, Chlamydomonas reinhardtii, Dunaliela salina, Synechococcus Sp. PCC 7002, Synechococcus Sp. PCC 7942, Synechocystis Sp. FCC 6803, Thermosynechococcus elongates BP-1, Chlorobium tepidum, Chlorojlexus auranticus, Chromatiumm vinosum, Rhodospirillum rubrum, Rhodobacter capsulatus, Rhodopseudomonas palusris, Clostridium ljungdahlii, Clostridiuthermocellum, Penicillium chrysogenum, Pichia pastoris, Saccharomyces cerevisiae, Schizosaccharomyces pombe, Pseudomonas fluorescens, or Zymomonas mobilis.

[0278] In certain preferred embodiments, the host cell is an E. coli cell. In some embodiments, the E. coli cell is a strain B, a strain C, a strain K, or a strain W E. coli cell.

[0279] In other embodiments, the host cell is a Pantoea citrea cell.

### Production of Fatty Acids Deriviatives in Host Cells.

[0280] As used herein, the term “conditions permissive for the production” means any conditions that allow a host cell to produce a desired product, such as a fatty acid or a fatty acid derivative. Similarly, the term “conditions in which the polynucleotide sequence of a vector is expressed” means any conditions that allow a host cell to synthesize a polypeptide. Suitable conditions include, for example, fermentation conditions. Fermentation conditions can comprise many parameters, such as temperature ranges, levels of aeration, and media composition. Each of these conditions, individually and in combination, allows the host cell to grow. Exemplary culture media include broths or gels. Generally, the medium includes a carbon source that can be metabolized by a host cell directly

[0281] To determine if conditions are sufficient to allow production of a product or expression of a polypeptide, a host cell can be cultured, for example, for about 4, 8, 12, 24, 36, 48, 72, or more hours. During and/or after culturing, samples can be obtained and analyzed to determine if the conditions allow production or expression. For example, the host cells in the sample or the medium in which the host cells were grown can be tested for the presence of a desired product. When testing for the presence of a fatty acid or fatty acid derivative, assays, such as, but not limited to, MS, thin layer chromatography (TLC), high-performance liquid chromatography (HPLC), liquid chromatography (LC), GC coupled with a flame ionization detector (FID), GC-MS, and LC-MS can be used. When testing for the expression of a polypeptide, techniques such as, but not limited to, Western blotting and dot blotting may be used.

[0282] In the compositions and methods of the invention, the production and isolation of fatty acids and fatty acid derivatives can be enhanced by optimizing fermentation conditions. In some embodiments, fermentation conditions are optimized to increase the percentage of the carbon source that is converted to hydrocarbon products. During normal cellular lifecycles, carbon is used in cellular functions, such as producing lipids, saccharides, proteins, organic acids, and nucleic acids. Reducing the amount of carbon necessary for growth-related activities can increase the efficiency of carbon source conversion to product. This can be achieved by, for example, first growing host cells to a desired density (for example, a density achieved at the peak of the log phase of growth). At such a point, replication checkpoint genes can be harnessed to stop the growth of cells. Specifically, quorum sensing mechanisms (reviewed in Camilli et al., Science 311: 1113 (2006); Venturi, FEMS Microbiol. Rev., 30: 274-291 (2006); and Reading et al., FEMS Microbiol. Lett., 254: 1-11 (2006)) can be used to activate checkpoint genes, such as p53, p21, or other checkpoint genes.

[0283] The host cell can be additionally engineered to express a recombinant cellulosome, which can allow the host cell to use cellulosic material as a carbon source. Exemplary cellulosomes suitable for use in the methods of the invention include, e.g., the cellulosomes described in International Patent Application Publication WO 2008/100251. The host cell also can be engineered to assimilate carbon efficiently and use cellulosic materials as carbon sources according to methods described in U.S. Pat. Nos. 5,000,000; 5,028,539; 5,424,202; 5,482,846; and 5,602,030. In addition, the host cell can be engineered to express an invertase so that sucrose can be used as a carbon source.

[0284] In some embodiments of the fermentation methods of the invention, the fermentation chamber encloses a fermentation that is undergoing a continuous reduction, thereby creating a stable reductive environment. The electron balance can be maintained by the release of carbon dioxide (in gaseous foam). Efforts to augment the NAD/H and NADP/H balance can also facilitate in stabilizing the electron balance. The availability of intracellular NADPH can also be enhanced by engineering the host cell to express an NADH:NADPH transhydrogenase. The expression of one or more NADH:NADPH transhydrogenases converts the NADH produced in glycolysis to NADPH, which can enhance the production of fatty aldehydes and fatty alcohols.

[0285] For small scale production, the engineered host cells can be grown in batches of, for example, about 100 mL, 500 mL, 1 L, 2 L, 5 L, or 10 L; fermented; and induced to express a desired polynucleotide sequence, such as a polynucleotide sequence encoding a PPTase. For large scale production, the engineered host cells can be grown in batches of about 10 L, 100 L, 1000 L, 10,000 L, 100,000 L, 1,000,000 L or larger; fennented; and induced to express a desired polynucleotide sequence.

[0286] The fatty acids and derivatives thereof produced by the methods of invention generally are isolated from the host cell. The term “isolated” as used herein with respect to products, such as fatty acids and derivatives thereof, refers to products that are separated from cellular components, cell culture media, or chemical or synthetic precursors. The fatty acids and derivatives thereof produced by the methods described herein can be relatively immiscible in the fermentation broth, as well as in the cytoplasm. Therefore, the fatty acids and derivatives thereof can collect in an organic phase either intracellularly or extracellularly. The collection of the products in the organic phase can lessen the impact of the fatty acid or fatty acid derivative on cellular function and can allow the host cell to produce more product.

[0287] In some embodiments, the fatty acids and fatty acid derivatives produced by the methods of invention are purified. As used herein, the term “purify,” “purified,” or “purification” means the removal or isolation of a molecule from its environment by, for example, isolation or separation. “Substantially purified” molecules are at least about 60% free (e.g., at least about 70% free, at least about 75% free, at least about 85% free, at least about 90% free, at least about 95% free, at least about 97% free, at least about 99% free) from other components with which they are associated. As used herein, these terms also refer to the removal of contaminants from a sample. For example, the removal of contaminants can result in an increase in the percentage of a fatty aldehyde or a fatty alcohol in a sample. For example, when a fatty aldehyde or a fatty alcohol is produced in a host cell, the fatty aldehyde or fatty alcohol can be purified by the removal of host cell proteins. After purification, the percentage of a fatty acid or derivative thereof in the sample is increased.

[0288] As used herein, the terms “purify,” “purified,” and “purification” are relative terms which do not require absolute purity. Thus, for example, when a fatty acid or derivative thereof is produced in host cells, a purified fatty acid or derivative thereof is a fatty acid or derivative thereof that is substantially separated from other cellular components (e.g., nucleic acids, polypeptides, lipids, carbohydrates, or other hydrocarbons).

[0289] Additionally, a purified fatty acid preparation or a purified fatty acid derivative preparation is a fatty acid preparation or a fatty acid derivative preparation in which the fatty acid or derivative thereof is substantially free from contaminants, such as those that might be present following fermentation. In some embodiments, a fatty acid or derivative thereof is purified when at least about 50% by weight of a sample is composed of the fatty acid or fatty acid derivative. In other embodiments, a fatty acid or derivative thereof is purified when at least about 60%, e.g., at least about 70%, at least about 80%, at least about 85%, at least about 90%, at least about 92% or more by weight of a sample is composed of the fatty acid or derivative thereof. Alternatively, or in addition, a fatty acid or derivative thereof is purified when less than about 100%, e.g., less than about 99%, less than about 98%, less than about 95%, less than about 90%, or less than about 80% by weight of a sample is composed of the fatty acid or derivative thereof. Thus, a purified fatty acid or derivative thereof can have a purity level bounded by any two of the above endpoints. For example, a fatty acid or derivative thereof can be purified when at least about 80%-95%, at least about 85%-99%, or at least about 90%-98% of a sample is composed of the fatty acid or fatty acid derivative.

[0290] The fatty acid or derivative thereof may be present in the extracellular environment, or it may be isolated from the extracellular environment of the host cell. In certain embodiments, a fatty acid or derivative thereof is secreted from the host cell. In other embodiments, a fatty acid or derivative thereof is transported into the extracellular environment. In yet other embodiments, the fatty acid or derivative thereof is passively transported into the extracellular environment.

[0291] A fatty acid or derivative thereof can be isolated from a host cell using methods known in the art, such as those disclosed in International Patent Application Publications WO 2010/042664 and WO 2010/062480.

[0292] The methods described herein can result in the production of homogeneous compounds wherein at least about 60%, at least about 70%, at least about 80%, at least about 90%, or at least about 95%, of the fatty acids or fatty acid derivatives produced will have carbon chain lengths that vary by less than 6 carbons, less than 5 carbons, less than 4 carbons, less than 3 carbons, or less than about 2 carbons. Alternatively, or in addition, the methods described herein can result in the production of homogeneous compounds wherein less than about 98%, less than about 95%, less than about 90%, less than about 80%, or less than about 70% of the fatty acids or fatty acid derivatives produced will have carbon chain lengths that vary by less than 6 carbons, less than 5 carbons, less than 4 carbons, less than 3 carbons, or less than about 2 carbons. Thus, the fatty acids or fatty acid derivatives can have a degree of homogeneity bounded by any two of the above endpoints. For example, the fatty acid or fatty acid derivative can have a degree of homogeneity wherein about 70%-95%, about 80%-98%, or about 90%-95% of the fatty acids or fatty acid derivatives produced will have carbon chain lengths that vary by less than 6 carbons, less than 5 carbons, less than 4 carbons, less than 3 carbons, or less than about 2 carbons. These compounds can also be produced with a relatively uniform degree of saturation.

[0293] As a result of the methods of the present invention, one or more of the titer, yield, or productivity of the fatty acid or derivative thereof produced by the engineered host cell having an altered level of expression of a FadR polypeptide is increased relative to that of the corresponding wild-type host cell.

[0294] The term “titer” refers to the quantity of fatty acid or fatty acid derivative produced per unit volume of host cell culture. In any aspect of the compositions and methods described herein, a fatty acid or a fatty acid derivative such as a terminal olefin, a fatty aldehyde, a fatty alcohol, an alkane, a fatty ester, a ketone or an internal olefins is produced at a titer of about 25 mg/L, about 50 mg/L, about 75 mg/L, about 100 mg/L, about 125 mg/L, about 150 mg/L, about 175 mg/L, about 200 mg/L, about 225 mg/L, about 250 mg/L, about 275 mg/L, about 300 mg/L, about 325 mg/L, about 350 mg/L, about 375 mg/L, about 400 mg/L, about 425 mg/L, about 450 mg/L, about 475 mg/L, about 500 mg/L, about 525 mg/L, about 550 mg/L, about 575 mg/L, about 600 mg/L, about 625 mg/L, about 650 mg/L, about 675 mg/L, about 700 mg/L, about 725 mg/L, about 750 mg/L, about 775 mg/L, about 800 mg/L, about 825 mg/L, about 850 mg/L, about 875 mg/L, about 900 mg/L, about 925 mg/L, about 950 mg/L, about 975 mg/L, about 1000 g/L, about 1050 mg/L, about 1075 mg/L, about 1100 mg/L, about 1125 mg/L, about 1150 mg/L, about 1175 mg/L, about 1200 mg/L, about 1225 mg/L, about 1250 mg/L, about 1275 mg/L, about 1300 mg/L, about 1325 mg/L, about 1350 mg/L, about 1375 mg/L, about 1400 mg/L, about 1425 mg/L, about 1450 mg/L, about 1475 mg/L, about 1500 mg/L, about 1525 mg/L, about 1550 mg/L, about 1575 mg/L, about 1600 mg/L, about 1625 mg/L, about 1650 mg/L, about 1675 mg/L, about 1700 mg/L, about 1725 mg/L, about 1750 mg/L, about 1775 mg/L, about 1800 mg/L, about 1825 mg/L, about 1850 mg/L, about 1875 mg/L, about 1900 mg/L, about 1925 mg/L, about 1950 mg/L, about 1975 mg/L, about 2000 mg/L, or a range bounded by any two of the foregoing values. In other embodiments, a fatty acid or fatty acid derivative is produced at a titer of more than 2000 mg/L, more than 5000 mg/L, more than 10,000 mg/L, or higher, such as 50 g/L, 70 g/L, 100 g/L, 120 g/L, 150 g/L, or 200 g/L.

[0295] The term “yield of the fatty acid or derivative thereof produced by a host cell” refers to the efficiency by which an input carbon source is converted to product (i.e., fatty acid or fatty acid derivative such as fatty alcohol or fatty ester) in a host cell. For oxygen-containing carbon sources (e.g., glucose and other carbohydrate based sources), the oxygen must be released in the form of carbon dioxide. For every 2 oxygen atoms released, a carbon atom is also released leading to a maximal theoretical metabolic efficiency of approximately 34% (w/w) (for fatty acid derived products). This figure, however, changes for other organic compounds and carbon sources. Typical yield reported in the literature are approximately less than 5%. Host cells engineered to produce fatty acids and fatty acid derivatives according to the methods of the invention can have a yield of at least about 3%, at least about 5%, at least about 10%, at least about 15%, at least about 18%, or at least about 20%. Alternatively, or in addition, the yield is about 30% or less, about 27% or less, about 25% or less, or about 22% or less. Thus, the yield can be bounded by any two of the above endpoints. For example, the yield of the fatty acid or derivative thereof produced by the engineered host cell according to the methods of the invention can be about 5% to about 25%, about 10% to about 25%, about 10% to about 22%, about 15% to about 27%, or about 18% to about 22%. In other embodiments, the yield is greater than 30%.

[0296] The term “productivity of the fatty acid or derivative thereof produced by a host cell” refers to the quantity of fatty acid or fatty acid derivative produced per unit volume of host cell culture per unit density of host cell culture. In any aspect of the compositions and methods described herein, the productivity of a fatty acid or a fatty acid derivative such as an olefin, a fatty aldehyde, a fatty alcohol, an alkane, a fatty ester, or a ketone produced by an engineered host cells is at least about at least about 3 mg/L/OD₆₀₀, at least about 6 mg/L/OD₆₀₀, at least about 9 mg/L/OD₆₀₀, at least about 12 mg/L/OD₆₀₀, or at least about 15 mg/L/OD₆₀₀. Alternatively, or in addition, the productivity is about 50 mg/L/OD₆₀₀ or less, about 40 mg/L/OD₆₀₀ or less, about 30 mg/L/OD₆₀₀ or less, or about 20 mg/L/OD₆₀₀ or less. Thus, the productivity can be bounded by any two of the above endpoints. For example, the productivity can be about 3 to about 30 mg/L/OD₆₀₀, about 6 to about 20 mg/L/OD₆₀₀, or about 15 to about 30 mg/L/OD₆₀₀.

[0297] In the compositions and methods of the invention, the production and isolation of a desired fatty acid or derivative thereof (e.g., acyl-CoA, fatty acids, terminal olefins, fatty aldehydes, fatty alcohols, alkanes, alkenes, wax esters, ketones and internal olefins) can be enhanced by altering the expression of one or more genes involved in the regulation of fatty acid, fatty ester, alkane, alkene, olefin fatty alcohol production, degradation and/or secretion in the engineered host cell.

### Characterization and Utility of Fatty Acids and Derivatives Thereof

[0298] Bioproducts (e.g., fatty alcohols) comprising biologically produced organic compounds, particularly fatty alcohols biologically produced using the fatty acid biosynthetic pathway, have not been produced from renewable sources and, as such, are new compositions of matter.

[0299] The hydrocarbons (and/or fatty aldehydes) described herein can be used as or converted into a fuel or as a specialty chemical. One of ordinary skill in the art will appreciate that, depending upon the intended purpose of the fuel or specialty chemical, different hydrocarbons (and/or fatty aldehydes) can be produced and used. For example, a branched hydrocarbon may be desirable for automobile fuels that are intended to be used in cold climates. In addition, when hydrocarbons are used as a feedstock for fuel and specialty chemical production, one of ordinarly skill in the art will appreciate that the characteristics of the hydrocarbon will affect the characteristics of the fuel or specialty chemicals produced. Hence the characteristics of the fuel or specialty chemical product can be selected for by producing particular hydrocarbons (and/or fatty aldehydes) for use as a feedstock.

[0300] Using the methods described herein, biofuels having desired fuel qualities can be produced from hydrocarbons (and/or fatty aldehydes). These thus represent a new source of biofuels, which can be used as jet fuels, diesel, or gasoline. Some biofuels made using hydrocarbons (and/or fatty aldehydes) thus prepared have not been produced from renewable sources and are new compositions of matter. These new fuels or specialty chemicals can be distinguished from fuels or specialty chemicals derived from petrochemical carbon on the basis of dual carbon-isotopic fingerprinting. Additionally, the specific source of biosourced carbon (e.g., glucose vs. glycerol) can be determined by dual carbon-isotopic fingerprinting (see, e.g., U.S. Pat. No. 7,169,588, which is herein incorporated by reference).

[0301] The ability to distinguish bioproducts from petroleum based organic compounds is beneficial in tracking these materials in commerce. For example, organic compounds or chemicals comprising both biologically based and petroleum based carbon isotope profiles may be distinguished from organic compounds and chemicals made only of petroleum based materials. Hence, the instant materials may be followed in commerce on the basis of their unique carbon isotope profile.

[0302] These new bioproducts can be distinguished from organic compounds derived from petrochemical carbon on the basis of dual carbon-isotopic fingerprinting (¹³C/¹²C) or ¹⁴C dating. Additionally, the specific source of biosourced carbon (e.g., glucose vs. glycerol) can be determined by dual carbon-isotopic fingerprinting (see, e.g., U.S. Pat. No. 7,169,588, which is herein incorporated by reference).

[0303] Bioproducts can be distinguished from petroleum based organic compounds by comparing the stable carbon isotope ratio (¹³C/¹²C) in each fuel. The ¹³C/¹²C ratio in a given bioproduct is a consequence of the ¹³C/¹²C ratio in atmospheric carbon dioxide at the time the carbon dioxide is fixed. It also reflects the precise metabolic pathway. Regional variations also occur. Petroleum, C₃ plants (the broadleaf), C₄ plants (the grasses), and marine carbonates all show significant differences in ¹³C/¹²C and the corresponding δ¹³C values. Furthermore, lipid matter of C₃ and C₄ plants analyze differently than materials derived from the carbohydrate components of the same plants as a consequence of the metabolic pathway.

[0304] Within the precision of measurement, ¹³C shows large variations due to isotopic fractionation effects, the most significant of which for bioproducts is the photosynthetic mechanism. The major cause of differences in the carbon isotope ratio in plants is closely associated with differences in the pathway of photosynthetic carbon metabolism in the plants, particularly the reaction occurring during the primary carboxylation (i.e., the initial fixation of atmospheric CO₂). Two large classes of vegetation are those that incorporate the “C₃” (or Calvin-Benson) photosynthetic cycle and those that incorporate the “C₄” (or Hatch-Slack) photosynthetic cycle.

[0305] Both C₄ and C₃ plants exhibit a range of ¹³C/¹²C isotopic ratios, but typical values are about −7 to about −13 per mil for C₄ plants and about −19 to about −27 per mil for C₃ plants (see, e.g., Stuiver et al., Radiocarbon 19:355, 1977). Coal and petroleum fall generally in this latter range. The ¹³C measurement scale was originally defined by a zero set by Pee Dee Belemnite (PDB) limestone, where values are given in parts per thousand deviations from this material. The “δ¹³C” values are expressed in parts per thousand (per mil), abbreviated, %₀₀, and are calculated as follows:

δ¹³C(%₀₀)=[(¹³C/¹²C)ₛₐₘₚₗₑ−(¹³C/¹²C)_{standard}]/(¹³C/¹²C)_{standard}×1000

[0306] Since the PDB reference material (RM) has been exhausted, a series of alternative RMs have been developed in cooperation with the IAEA, USGS, NIST, and other selected international isotope laboratories. Notations for the per mil deviations from PDB is δ¹³C. Measurements are made on CO₂ by high precision stable ratio mass spectrometry (IRMS) on molecular ions of masses 44, 45, and 46.

[0307] The compositions described herein include bioproducts produced by any of the methods described herein. Specifically, the bioproduct can have a δ¹³C of about −28 or greater, about −27 or greater, −20 or greater, −18 or greater, −15 or greater, −13 or greater, −10 or greater, or −8 or greater. For example, the bioproduct can have a δ¹³C of about −30 to about −15, about −27 to about −19, about −25 to about −21, about −15 to about −5, about −13 to about −7, or about −13 to about −10. In other instances, the bioproduct can have a δ¹³C of about −10, −11, −12, or −12.3.

[0308] Bioproducts can also be distinguished from petroleum based organic compounds by comparing the amount of ¹⁴C in each compound. Because ¹⁴C has a nuclear half life of 5730 years, petroleum based fuels containing “older” carbon can be distinguished from bioproducts which contain “newer” carbon (see, e.g., Currie, “Source Apportionment of Atmospheric Particles”, Characterization of Environmental Particles, J. Buffle and H. P. van Leeuwen, Eds., 1 of Vol. I of the IUPAC Environmental Analytical Chemistry Series (Lewis Publishers, Inc) (1992) 3-74).

[0309] The basic assumption in radiocarbon dating is that the constancy of ¹⁴C concentration in the atmosphere leads to the constancy of ¹⁴C in living organisms. However, because of atmospheric nuclear testing since 1950 and the burning of fossil fuel since 1850, ¹⁴C has acquired a second, geochemical time characteristic. Its concentration in atmospheric CO₂, and hence in the living biosphere, approximately doubled at the peak of nuclear testing, in the mid-1960s. It has since been gradually returning to the steady-state cosmogenic (atmospheric) baseline isotope rate (¹⁴C/¹²C) of about 1.2×10⁻¹², with an approximate relaxation “half-life” of 7-10 years. (This latter half-life must not be taken literally; rather, one must use the detailed atmospheric nuclear input/decay function to trace the variation of atmospheric and biospheric ¹⁴C since the onset of the nuclear age.)

[0310] It is this latter biospheric ¹⁴C time characteristic that holds out the promise of annual dating of recent biospheric carbon. ¹⁴C can be measured by accelerator mass spectrometry (AMS), with results given in units of “fraction of modern carbon” (f_{M}). f_{M} is defined by National Institute of Standards and Technology (NIST) Standard Reference Materials (SRMs) 4990B and 4990C. As used herein, “fraction of modern carbon” or “f_{M}” has the same meaning as defined by National Institute of Standards and Technology (NIST) Standard Reference Materials (SRMs) 4990B and 4990C, known as oxalic acids standards HOxI and HOxII, respectively. The fundamental definition relates to 0.95 times the ¹⁴C/¹²C isotope ratio HOxI (referenced to AD 1950). This is roughly equivalent to decay-corrected pre-Industrial Revolution wood. For the current living biosphere (plant material), f_{M} is approximately 1.1.

[0311] The compositions described herein include bioproducts that can have an f_{M} ¹⁴C of at least about 1. For example, the bioproduct can have an f_{M} ¹⁴C of at least about 1.01, an f_{M} ¹⁴C of about 1 to about 1.5, an f_{M} ¹⁴C of about 1.04 to about 1.18, or an f_{M} ¹⁴C of about 1.111 to about 1.124.

[0312] Another measurement of ¹⁴C is known as the percent of modern carbon, pMC. For an archaeologist or geologist using ¹⁴C dates, AD 1950 equals “zero years old”. This also represents 100 pMC. “Bomb carbon” in the atmosphere reached almost twice the normal level in 1963 at the peak of thermo-nuclear weapons. Its distribution within the atmosphere has been approximated since its appearance, showing values that are greater than 100 pMC for plants and animals living since AD 1950. It has gradually decreased over time with today's value being near 107.5 pMC. This means that a fresh biomass material, such as corn, would give a ¹⁴C signature near 107.5 pMC. Petroleum based compounds will have a pMC value of zero. Combining fossil carbon with present day carbon will result in a dilution of the present day pMC content. By presuming 107.5 pMC represents the ¹⁴C content of present day biomass materials and 0 pMC represents the ¹⁴C content of petroleum based products, the measured pMC value for that material will reflect the proportions of the two component types. For example, a material derived 100% from present day soybeans would give a radiocarbon signature near 107.5 pMC. If that material was diluted 50% with petroleum based products, it would give a radiocarbon signature of approximately 54 pMC.

[0313] A biologically based carbon content is derived by assigning “100%” equal to 107.5 pMC and “0%” equal to 0 pMC. For example, a sample measuring 99 pMC will give an equivalent biologically based carbon content of 93%. This value is referred to as the mean biologically based carbon result and assumes all the components within the analyzed material originated either from present day biological material or petroleum based material.

[0314] A bioproduct described herein can have a pMC of at least about 50, 60, 70, 75, 80, 85, 90, 95, 96, 97, 98, 99, or 100. In other instances, a bioproduct described herein can have a pMC of between about 50 and about 100; about 60 and about 100; about 70 and about 100; about 80 and about 100; about 85 and about 100; about 87 and about 98; or about 90 and about 95. In yet other instances, a bioproduct described herein can have a pMC of about 90, 91, 92, 93, 94, or 94.2.

[0315] The fatty alcohols described herein can be used as or converted into a surfactant or detergent composition. One of ordinary skill in the art will appreciate that, depending upon the intended purpose of the surfactant or detergent, different fatty alcohols can be produced and used. For example, when the fatty alcohols described herein are used as a feedstock for surfactant or detergent production, one of ordinary skill in the art will appreciate that the characteristics of the fatty alcohol feedstock will affect the characteristics of the surfactant or detergent produced. Hence, the characteristics of the surfactant or detergent product can be selected for by producing particular fatty alcohols for use as a feedstock.

[0316] Fuel additives are used to enhance the performance of a fuel or engine. For example, fuel additives can be used to alter the freezing/gelling point, cloud point, lubricity, viscosity, oxidative stability, ignition quality, octane level, and/or flash point. In the United States, all fuel additives must be registered with Environmental Protection Agency. The names of fuel additives and the companies that sell the fuel additives are publicly available by contacting the EPA or by viewing the agency's website. One of ordinary skill in the art will appreciate that the fatty alcohol-based biofuels described herein can be mixed with one or more fuel additives to impart a desired quality.

[0317] The fatty alcohol-based surfactants and/or detergents described herein can be mixed with other surfactants and/or detergents well known in the art.

[0318] In some examples, the mixture can include at least about 10%, 15%, 20%, 30%, 40%, 50%, or 60% by weight of the fatty alcohol. In other examples, a surfactant or detergent composition can be made that includes at least about 5%, 10%, 20%, 30%, 40%, 50%, 60%, 70%, 80%, 85%, 90% or 95% of a fatty alcohol that includes a carbon chain that is 8, 10, 12, 13, 14, 15, 16, 17, 18, 19, 20, 21 or 22 carbons in length. Such surfactant or detergent compositions can additionally include at least one additive selected from a surfactant; a microemulsion; at least about 5%, 10%, 15%, 20%, 30%, 40%, 50%, 60%, 70%, 80%, 85%, 90%, or 95% of surfactant or detergent from nonmicrobial sources such as plant oils or petroleum.

[0319] The hydrocarbon (and/or fatty aldehyde)-based biofuel described herein can be mixed with other fuels, such as various alcohols, such as ethanol and butanol, and petroleum derived products, such as gasoline, diesel, or jet fuel.

[0320] In some examples, the mixture can include at least about 10%, 15%, 20%, 30%, 40%, 50%, or 60% by weight of the hydrocarbon (and/or fatty aldehydes). In other examples, a biofuel composition can be made that includes at least about 5%, 10%, 20%, 30%, 40%, 50%, 60%, 70%, 80%, 85%, 90% or 95% of a hydrocarbon such as an alkane or an alkene that includes a carbon chain that is 8, 10, 12, 13, 14, 15, 16, 17, 18, 19, 20, 21 or 22 carbons in length. Such biofuel composition can additionally include at least one additive selected from a cloud point lowering additive that can lower the cloud point to less than about 5° C., or 0° C.; a surfactant, a microemulsion; at least about 5%, 10%, 20%, 30%, 40%, 50%, 60%, 70%, 80%, 85%, 90% or 95% diesel fuel from triglycerides; petroleum-derived gasoline; or diesel fuel from petroleum.

[0321] Although the foregoing has been described in some detail by way of illustration and example for purposes of clarity and understanding, it will be apparent to those skilled in the art that certain changes and modifications may be practiced. Various aspects of the invention have been achieved by a series of experiments, some of which are described by way of the following non-limiting examples. Therefore, the description and examples should not be construed as limiting the scope of the invention, which is delineated by the appended description of exemplary embodiments.

### EXAMPLES

### Example 1

[0322] An AlrA enzyme from Acinetobacter sp. M-1 has been shown to catalyze the reduction of fatty aldehyde into fatty alcohols in vitro at neutral or low pH conditions. (Tani et al. Appl. Environ. Microbiol. 66(12):5231-5 (2000)). However, E. coli fatty alcohol biosynthetic polypeptides, which are capable of catalyzing the reduction of fatty aldehydes to fatty alcohols, were not identified, although it has been reported that E. coli constitutively expresses such a reductase activity. (Naccarato et al., Lipids 9(6):419-28 (1974)). It had also been reported that the E. coli reductase activity was NADPH-dependent. Id.

[0323] A BLAST search of the Acinetobacter baylyi ADP1 genomic and protein databases for homologs of Acinetobacter sp. M-1 AlrA revealed an Acinetobacter baylyi ADP1 homolog, AlrAadp1 (GenPept Accession Number CAG 70248.1), has about 79% identity to the Acinetobacter sp. M-1 AlrA.

[0324] This example describes an experiment verifying that co-expression of a heterologous carboxylic acid reductase from Acinetobacter baylyi ADP1, AlrAadp1 (a homolog of Acinetobacter sp. M-1 AlrA) and a CarB homolog resulted in fatty alcohol production in E. coli.

### CAR Plasmid Construction

[0325] Three E. coli expression plasmids were constructed to express the genes encoding the CAR homologs listed in Table 7.

TABLE 7
CAR-like Protein and the corresponding coding sequences.

| Genpept Acc. | Locus_tag | Annotation in GenBank | Gene name |
|---|---|---|---|
| NP_217106 | Rv 2590 | Probable fatty-acid-CoA | fadD9 |
| | | ligase (FadD9) | |
| ABK75684 | MSMEG | NAD dependent epimerase/ | carA |
| | 2956 | dehydratase family protein | |
| YP_889972.1 | MSMEG | NAD dependent epimerase/ | carB |
| | 5739 | dehydratase family protein | |

[0326] The fadD9 gene was amplified from genomic DNA of Mycobacterium tuberculosis H37Rv (obtained from The University of British Columbia, and Vancouver, BC Canada) using the primers fadD9F and FadDR (see Table 8). The PCR product was first cloned into PCR-blunt (Invitrogen) and then released as an NdeI-AvrII fragment. The NdeI-AvrII fragment was then cloned between the NdeI and AvrII sites of pACYCDuet-1 (Novogen) to generate pACYCDuet-1-fadD9.

[0327] The carA gene was amplified from the genomic DNA of Mycobacterium smegmatis MC2 155 (obtained from the ATCC (ATCC 23037D-5)) using primers CARMCaF and CARMCaR (see Table 8). The carB gene was amplified from the genomic DNA of Mycobacterium smegmatis MC2 155 (obtained from the ATCC (ATCC 23037D-5)) using primers CARMCbF and CARMCbR (see Table 8). Each PCR product was first cloned into PCR-blunt and then released as an NdeI-AvrII fragment. Each of the two fragments was then subcloned between the NdeI and AvrII sites of pACYCDuet-1 (Novogen) to generate pACYCDuet-1-carA and pACYCDuet-1-carB.

TABLE 8
Primers used to amplify genes encoding CAR
homologs

| | |
|---|---|
| fadD9F | cat ATGTCGATCAACGATCAGCGACTGAC |
| | (SEQ ID NO: 211) |
| fadD9R | cctagg TCACAGCAGCCCGAGCAGTC |
| | (SEQ ID NO: 212) |
| CARMCaF | cat ATGACGATCGAAACGCG |
| | (SEQ ID NO: 213) |
| CARMCaR | cctagg TTACAGCAATCCGAGCATCT |
| | (SEQ ID NO: 214) |
| CARMCbF | cat ATGACCAGCGATGTTCAC |
| | (SEQ ID NO: 215) |
| CARMCbR | cctagg TCAGATCAGACCGAACTCACG |
| | (SEQ ID NO: 216) |

[0328] Construction of plasmid pETDuet-1-'tesA-alrAadp1 was carried out with the protocol below. The plasmid pETDuet-1-'tesA-alrAadp1 was prepared by inserting the alrAadp1 gene (gene locus-tag=“ACIAD3612”), a homolog of Acinetobacter baylyi ADP1, into the NcoI and HindIII sites of pETDuet-1-'tesA.

[0329] The gene alrAadp1 was amplified from the genomic DNA of Acinetobacter baylyi ADP1 by a two-step PCR procedure. The first set of PCR reactions eliminated an internal NcoI site at by 632-636 with the following primer pairs:

ADP1 Alr mut1 reverse:
(SEQ ID NO: 217)
5′-GACCACGTGATCGGCCCCCATAGCTTTGAGCTCATC
ADP1 Alr1 mut1 forward:
(SEQ ID NO: 218)
5′-GATGAGCTCAAAGCTATGGGGGCCGATCACGTGGTC

[0330] The PCR products were then isolated, purified using the Qiagen gel extraction kit, and used as inputs for a second PCR reaction with the following primers to produce full-length AlrAadp1 with a C→T mutation at position 633:

NcoI ADP1 Alr1 forward:
(SEQ ID NO: 219)
5′-AATACCATGGCAACAACTAATGTGATTCATGCTTATGCTGCA
HindIII ADP1 Alr1 reverse:
(SEQ ID NO: 220)
5′-ATAAAAGCTTTTAAAAATCGGCTTTAAGTACAATCCGATAAC

### Evaluation of Fatty Alcohol Production

[0331] In order to evaluate the affect of carboxylic acid reductases and alcohol dehydrogenases on the production of fatty alcohols, various combinations of the prepared plasmids were transformed in the E. coli strain C41 (DE3, ΔfadE) (described in PCT/US08/058,788).

[0332] For example, the plasmid pACYCDuet-1-carA, encoding the CAR homolog carA, was co-transformed with pETDuet-1-'tesA-alrAadp1 (see, e.g., FIG. 27A). The plasmid pACYCDuet-1-carB, encoding the CAR homolog, carB, was co-transformed with pETDuet-1-'tesA. In addition, pACYCDuet-1-carB was also separately co-transformed with pETDuet-1-'tesA-alrAadp1. As a control, pACYCDuet-1-carB was co-transformed with the empty vector pETDuet-1 (see, e.g., FIG. 27A). The plasmid pACYCDuet-1-fadD9, encoding the CAR homolog fadD9, was also co-transformed with pETDuet-1-'tesA. In addition, pACYCDuet-1-fadD9 was also separately co-transformed with pETDuet-1-'tesA-alrAadp1. As a control, pACYCDuet-1-fadD9 was co-transformed with the empty vector pETDuet-1 (see, e.g., FIG. 27A).

[0333] The E. coli transformants were grown in 3 mL of LB medium supplemented with carbenicillin (100 mg/L) and chloramphenicol (34 mg/L) at 37° C. After overnight growth, 15 μL of culture was transferred into 2 mL of fresh LB medium supplemented with carbenicillin and chloramphenicol. After 3.5 hours of growth, 2 mL of culture were transferred into a 125 mL flask containing 20 mL of M9 medium with 2% glucose and with carbenicillin and chloramphenicol. When the OD₆₀₀ of the culture reached 0.9, 1 mM of IPTG was added to each flask. After 20 hours of growth at 37° C., 20 mL of ethyl acetate (with 1% of acetic acid, v/v) was added to each flask to extract the fatty alcohols produced during the fermentation. The crude ethyl acetate extract was directly analyzed with GC/MS as described herein.

[0334] The expression of carA or carB with the leaderless tesA and alrAadp1 resulted in fatty alcohol titers of greater than 700 mg/L and reduced fatty aldehyde production (see, e.g., FIG. 27A). Likewise, fadD9 co-expressed with the leaderless tesA and alrAadp1 produced over 300 mg/L of fatty alcohol. When expressed without the leaderless tesA, neither carB nor fadD9 produced more than 10 mg/L of fatty alcohols (possibly resulting from the accumulation of free fatty acids in the cell due to endogenous tesA). Taken together, this data indicates that fatty acids are the substrates for these CAR homologs and that overexpression of a thioesterase, such as 'tesA (to release fatty acids from acyl-ACP), achieves significant production of fatty alcohols.

[0335] Depending upon the CAR homolog expressed in E. coli strain C41 (DE3, ΔfadE) (described below in Example 2), different mixtures of fatty alcohols were produced. Different compositions of fatty alcohols were observed among the three CAR homologs evaluated (see Table 9). FadD9 produced more C₁₂ fatty alcohols relative to other fatty alcohols with carbon chain lengths greater than 12. Both CarA and CarB produced a wider range in chain length of fatty alcohols than was observed when expressing FadD9.

TABLE 9
Acyl-composition of fatty alcohols produced by recombinant E.coli strains.

| Expressed with | | | | | | | |
|---|---|---|---|---|---|---|---|
| TesA* | Acyl-composition of fatty alcohols (%) | | | | | | |
| and AlrAadp1 | C10:0 | C12 | C14:1 | C14:0 | C16:1 | C16:0 | C18:1 |
| CarA | trace | 38 | 13 | 27 | 16 | 4 | 3 |
| FadD9 | trace | 63 | 14 | 16 | 7 | trace | trace |
| CarB | trace | 32 | 11 | 41 | 12 | trace | trace |

*the leaderless TesA. C12, including C12:0 and C12:1 fatty alcohols

### Quantification and Identification of Fatty Alcohols

[0336] GC/MS was performed using an Agilent 5975B MSD system equipped with a 30 m×0.25 mm (0.10 μm film) DB-5 column. The column temperature was 3 min isothermal at 100° C. The column was programmed to rise from 100° C. to 320° C. at a rate of 20° C./min. When the final temperature was reached, the column remained isothermal for 5 minutes at 320° C. The injection volume was 1 μL. The carrier gas, helium, was released at 1.3 mL/min. The mass spectrometer was equipped with an electron impact ionization source. The ionization source temperature was set at 300° C.

[0337] Prior to quantification, various alcohols were identified using two methods. First, the GC retention time of each compound was compared to the retention time of a known standard, such as a cetyl alcohol, dodecanol, tetradecanol, octadecanol, or cis-9-octadecenol. Second, identification of each compound was confirmed by matching the compound's mass spectrum to a standard's mass spectrum in the mass spectra library (e.g., C12:0, C12:1, C13:0, C14:0, C14:1, C15:0. C16:0, C16:1, C17:0, C18:0 and C18:1 alcohols).

### Example 2

[0338] This example describes the identification of a fatty alcohol biosynthetic polypeptide, YjgB, in E. coli.

[0339] E. coli contains multiple enzymes that catalyze the reversible oxidoreduction of fatty aldehydes and fatty alcohols. A BLAST search and comparison of the E. coli K12 genomic and protein databases for homologs of Acinetobacter sp. M-1 AlrA revealed that the E. coli enzyme YjgB might be the closest homolog with an about 57% sequence identity. This example sought to verify the fatty alcohol biosynthetic activity of E. coli YjgB by overexpressing YjgB with a CarB in E. coli and measure the accumulation of fatty aldehyde and production of fatty alcohols.

[0340] The plasmid pETDuet-1-'tesA-yjgB carrying 'tesA and yjgB (a putative alcohol dehydrogenase; GenBank accession number, NP_{—}418690; GenPept accession number AAC77226) from the E. coli K12 strain was prepared.

[0341] The gene yjgB (GenBank accession number, NP_{—}418690) insert was amplified using PCR from the genomic DNA of E. coli K-12 using the following primers.

NcoI YjgB forward:
(SEQ ID NO: 221)
aatccTGGCATCGATGATAAAAAGCTATGCCGCAAAAG
HindIII YjgB reverse:
(SEQ ID NO: 222)
ataaaagctTTCAAAAATCGGCTTTCAACACCACGCGG

[0342] The PCR product was then subcloned into the NcoI and HindIII sites of pETDuet-1-'tesA to generate pETDuet-1-'tesA-yjgB.

[0343] In order to evaluate the affect of carboxylic acid reductases and alcohol dehydrogenases on the production of fatty alcohols, various combinations of the prepared plasmids were transformed in the E. coli strain C41 (DE3, ΔfadE) (described in PCT/US08/058,788).

[0344] The plasmid pACYCDuet-1-carB, encoding the CAR homolog carB, was co-transformed with pETDuet-1-'tesA. In addition, pACYCDuet-1-carB was also separately co-transformed with pETDuet-1-'tesA-yjgB. As a control, pACYCDuet-1-carB was co-transformed with the empty vector pETDuet-1 (see, e.g., FIG. 28).

[0345] The plasmid pACYCDuet-1-fadD9, encoding the CAR homolog fadD9, was co-transformed with pETDuet-1-'tesA. In addition, pACYCDuet-1-fadD9 was also separately co-transformed with pETDuet-1-'tesA-yjgB. As a control, pACYCDuet-1-fadD9 was co-transformed with the empty vector pETDuet-1 (see, e.g., FIG. 28).

[0346] As an additional control, pETDuet-1-'tesA-yjgB was co-transformed with the empty vector pACYCDuet-1.

[0347] The E. coli transformants were grown in 3 mL of LB medium supplemented with carbenicillin (100 mg/L) and chloramphenicol (34 mg/L) at 37° C. After overnight growth, 15 μL of culture was transferred into 2 mL of fresh LB medium supplemented with carbenicillin and chloramphenicol. After 3.5 hours of growth, 2 mL of culture were transferred into a 125 mL flask containing 20 mL of M9 medium with 2% glucose and with carbenicillin and chloramphenicol. When the OD₆₀₀ of the culture reached 0.9, 1 mM of IPTG was added to each flask. After 20 hours of growth at 37° C., 20 mL of ethyl acetate (with 1% of acetic acid, v/v) was added to each flask to extract the fatty alcohols produced during the fermentation. The crude ethyl acetate extract was directly analyzed with GC/MS as described herein.

[0348] The measured retention times were 6.79 minutes for cis-5-dodecen-1-ol, 6.868 minutes for 1-dodecanol, 8.058 minutes for cis-7-tetradecen-1-ol, 8.19 minutes for 1-tetradecanol, 9.208 minutes for cis-9-hexadecen-1-ol, 9.30 minutes for 1-hexadecanol, and 10.209 minutes for cis-11-octadecen-1-ol.

[0349] As can be concluded from this example, the production of fatty alcohols from fatty aldehydes in the E. coli strains described above may have been catalyzed by more than one endogenous fatty alcohol biosynthetic polypeptides. On the other hand, it has been demonstrated that overexpression of YjgB with CarB and leaderless TesA significantly reduced the accumulation of fatty aldehydes, as compared to control strains that did not overexpress YjgB. But it was also noted that overexpression of YjgB appeared to reduce the overall fatty alcohol production.

### Example 3

[0350] This example describes the identification of other fatty alcohol biosynthetic polypeptides in E. coli.

[0351] A reverse genetic approach was used to identify potential fatty alcohol biosynthetic genes in E. coli MG1655 cells by expressing the acyl-ACP reductase YP_{—}400611 from Synechococcus elongatus (Synpcc7942_{—}1594) (SEQ ID NO:137). Four 3 mL LB cultures were grown overnight at 37° C., and 55 μL of stationary phase cultures were used to inoculate four independent 5.5 mL of LB. Those 5.5 mL cultures were then grown to an OD₆₀₀ of 0.8-1.0 and were then used to inoculate a corresponding number of 2 L baffled shakeflasks, each with 500 mL Hu-9 minimal media. 20 hrs after induction the cells were pelleted at 4,000×g for 20 min. The cell pellet was resuspended in 30 mL of 100 mM phosphate buffer at pH 7.2 with 1× Bacterial Protease Arrest (G Biosciences). The cells were lysed in a French press at 15,000 psi with two passes through the instrument. The cell debris was then removed by centrifuging at 10,000×g for 20 mins. The cell lysate was loaded onto two HiTrapQ columns (GE Healthcare) connected in series. The following buffers were used to elute proteins: (A) 50 mM Tris, pH 7.5 and (B) 50 mM Tris, pH 7.5 with 1 M NaCl. A gradient from 0% B to 100% B was run over 5 column volumes at a flow rate of 3 mL/min while 4 mL fractions were collected.

[0352] The fractions were assayed for alcohol biosynthetic enzymatic (e.g., aldehyde reductase/alcohol dehydrogenase) activity by taking 190 μL of a protein fraction and adding 5 μL of a 20 mM NADPH (Sigma) solution and 5 μL of a 20 mM dodecanal (Fluka) solution in DMSO. The reactions were incubated at 37° C. for 1 hr. They were then extracted with 100 μL of ethyl acetate and analyzed for dodecanol via GC/MS. Fractions eluting around 350 mM NaCl contained a fatty alcohol biosynthetic enzyme activity.

[0353] Fractions containing fatty alcohol biosynthetic enzyme activity were pooled and loaded onto a 1 mL ResourceQ column (GE Healthcare). The same conditions used for the HiTrapQ column were used, except 0.5 mL fractions were collected. Protein fractions demonstrating a capacity of converting fatty aldehydes to fatty alcohols were then pooled and concentrated using Amicon (Milipore) protein concentrators (10,000 kDa cutoffs) to a volume of 1 mL. The solution was then loaded onto a HiPrep 200 size exclusion column (GE Healthcare). A buffer solution containing 50 mM Tris, pH 7.5, and 150 mM NaCl was run through the column at a rate of 0.3 mL per min. 2 mL fractions were collected. Two protein fractions were identified as having fatty alcohol biosynthetic enzyme activity. These two fractions, plus fractions before and after these two fractions, were loaded onto a polyacrylamide gel and stained with SimplySafe Commassie stain (Invitrogen).

[0354] Comparing the bands in the active and inactive fractions, one protein band, which appeared in the active fraction, was not seen in the inactive fraction. This protein band was cut from gel and submitted to the Stanford Mass Spectroscopy Facility for LC/MS/MS protein sequencing. One of the proteins identified in this analysis was YahK. E. coli YahK was determined to be the closest paralogs of YjgB, with about 31% sequence identity to the latter.

### Example 4

[0355] This example describes the verification of YjgB and YahK as fatty alcohol biosynthetic polypeptides.

Construction of fadD Deletion Strain

[0356] The fadD gene of E. coli MG1655 was deleted using the lambda red system (Datsenko et al., Proc. Natl. Acad. Sci. USA. 97: 6640-6645 (2000)) as follows:

[0357] The chloramphenicol acetyltransferase gene from pKD3 was amplified with the primers fad1: (5′-TAACCGGCGTCTGACGACTGACTTAACGCTCAGGCTTTATT GTCCACTTTGTGTAGGCTGGAGCTGCTTCG-3′) (SEQ ID NO:223), and fad2: (5′-CATTTGGGGTTGCGATGACGACGAACACGCATTTTAGAGGTGAAGAATTGCATATG AATATCCTCCTTTAGTTCC-3′) (SEQ ID NO:224).

[0358] This PCR product was electroporated into E. coli MG1655 (pKD46). The cells were plated on L-chloramphenicol (30 μg/mL)(L-Cm) and grown overnight at 37° C. Individual colonies were picked on to another L-Cm plate and grown at 42° C. These colonies were then patched to L-Cm and L-carbenicillin (100 mg/mL) (L-Cb) plates and grown at 37° C. overnight. Colonies that were Cm^{R} and Cb^{S} were evaluated further by PCR to ensure the PCR product inserted at the correct site.

[0359] PCR verification was performed on colony lysates of these bacteria using the primers fadF (5′-CGTCCGTGGTAATCATTTGG-3′) (SEQ ID NO:225) and fadR (5′-TCGCAACCTTTTCGTTGG-3′) (SEQ ID NO:226). Expected size of the ΔfadD::Cm deletion was about 1200 bp. The chloramphenicol resistance gene was eliminated using a FLP helper plasmid as described in Datsenko et al., Proc. Natl. Acad. Sci. USA 97:6640-6645 (2000). PCR verification of the deletion was performed with primers fadF and fadR. The MG1655 ΔfadD strain was unable to grow on M9+oleate agar plates (oleate as carbon source). It was also unable to grow in M9+oleate liquid media. The growth defect was complemented by an E. coli fadD gene supplied in trans (in pCL1920-Ptrc).

Construction of MG1655(DE3, ΔfadD) Strain

[0360] To generate a T7-responsive strain, the λDE3 Lysogenization Kit (Novagen) was utilized, which is designed for site-specific integration of λDE3 prophage into an E. coli host chromosome, such that the lysogenized host can be used to express target genes cloned in T7 expression vectors. λDE3 is a recombinant phage carrying the cloned gene for T7 RNA polymerase under lacUV5 control. Briefly, the host strain was cultured in LB supplemented with 0.2% maltose, 10 mM MgSO₄, and antibiotics at 37° C. to an OD₆₀₀ of 0.5. Next, 10⁸ pfu λDE3, 10⁸ pfu Helper Phage, and 10⁸ pfu Selection Phage were incubated with 10 λL host cells. The host/phage mixture was incubated at 37° C. for 20 min to allow phage to adsorb to host. Finally, the mixture was pipetted onto an LB plate supplemented with antibiotics. The mixture was spread evenly using plating beads, and the plates were inverted plates and incubated at 37° C. overnight.

[0361] λDE3 lysogen candidates were evaluated by their ability to support the growth of the T7 Tester Phage. T7 Tester Phage is a T7 phage deletion mutant that is completely defective unless active T7 RNA polymerase is provided by the host cell. The T7 Tester Phage makes very large plaques on authentic λDE3 lysogens in the presence of IPTG, while much smaller plaques are observed in the absence of inducer. The relative size of the plaques in the absence of IPTG is an indication of the basal level expression of T7 RNA polymerase in the lysogen, and can vary widely between different host cell backgrounds.

[0362] The following procedure was used to determine the presence of DE3 lysogeny. First, candidate colonies were grown in LB supplemented with 0.2% maltose, 10 mM MgSO₄, and antibiotics at 37° C. to an OD₆₀₀ of 0.5. An aliquot of T7 Tester Phage was then diluted in 1× Phage Dilution Buffer to a titer of 2×10³ pfu/mL. In duplicate tubes, 100 μL host cells were mixed with 100 μL diluted phage. The host/phage mixture was incubated at room temperature for 10 min to allow phage to adsorb to host. Next, 3 mL of molten top agarose was added to each tube containing host and phage. The contents of one duplicate were plated onto an LB plate and the other duplicate onto an LB plate supplemented with 0.4 mM IPTG (isopropyl-b-thiogalactopyranoside) to evaluate induction of T7 RNA polymerase. Plates were allowed to sit undisturbed for 5 min until the top agarose hardened. The plates were then inverted at 30° C. overnight.

Construction of MG1655(DE3, ΔfadD, yjgB::kan) Strain

[0363] The yjgB knockout strain, MG1655(DE3, ΔfadD, yjgB::kan), was constructed by using the following lambda red system (Datsenko et al., Proc. Natl. Acad. Sci. USA 97:6640-6645 (2000)):

[0364] The kanamycin resistant gene from pKD13 was amplified with the primers yjgBRn: (5′-GCGCCTCAGATCAGCGCTGCGAATGATTTTCAAAAATCGGCTTTCAACACTG TAGGCTGGAGCTGCTTCG-3′) (SEQ ID NO:227), and yjgBFn: (5′-CTGCCATGCTCTA CACTTCCCAAACAACACCAGAGAAGGACCAAAAAATGATTCCGGGGATCCGTCGAC C-3′) (SEQ ID NO:228). The PCR product was then electroporated into E. coli MG1655 (DE3, ΔfadD)/pKD46. The cells were plated on kanamycin (50 μg/mL) (L-Kan) and grown overnight at 37° C. Individual colonies were picked on to another L-Kan plate and grown at 42° C. These colonies were then patched to L-Kan and carbenicillin (100 mg/mL) (L-Cb) plates and grown at 37° C. overnight. Colonies that were kan^{R} and Cb^{S} were evaluated further by PCR to ensure the PCR product was inserted at the correct site.

[0365] PCR verification was performed on colony lysates of these bacteria using the primers BF (5′-gtgctggcgataCGACAAAACA-3′) (SEQ ID NO:229) and BR (5′-CCCCGCCCTGCCATGCTCTACAC-3′) (SEQ ID NO:230). The expected size of the yjgB::kan knockout was about 1450 bp.

[0366] In Example 2, a fadE deletion strain was used for fatty aldehyde and fatty alcohol production from 'TesA, CAR homologs, and endogenous YjgB in E. coli. Here, to demonstrate that CAR homologs used fatty acids instead of acyl-CoA as a substrate, the gene encoding for acyl-CoA synthase in E. coli (fadD) was deleted so that the fatty acids produced were not activated with CoA. E. coli strain MG1655(DE3, ΔfadD) was transformed with pETDuet-1-'tesA and pACYCDuet-1-carB. The transformants were evaluated for fatty alcohol production using the methods described herein. These transformants produced about 360 mg/L of fatty alcohols (dodecanol, dodecenol, tetredecanol, tetredecenol, cetyl, hexadecenol, and octadecenol).

### Confirming YjgB as a Fatty Alcohol Biosynthetic Polypeptide

[0367] To confirm that YjgB was an alcohol dehydrogenase responsible for converting fatty aldehydes into their corresponding fatty alcohols, pETDuet-1-'tesA and pACYCDuet-1-fadD9 were co-transformed into either MG1655(DE3, ΔfadD) or MG1655(DE3, ΔfadD, yjgB::kan). At the same time, MG1655(DE3, ΔfadD, yjgB::kan) was transformed with both pETDuet-1-'tesA-yjgB and pACYCDuet-1-fadD9.

[0368] The E. coli transformants were grown in 3 mL of LB medium supplemented with carbenicillin (100 mg/L) and chloramphenicol (34 mg/L) at 37° C. After overnight growth, 15 μL of culture was transferred into 2 mL of fresh LB medium supplemented with carbenicillin and chloramphenicol. After 3.5 hrs of growth, 2 mL of culture was transferred into a 125 mL flask containing 20 mL of M9 medium with 2% glucose, carbenicillin, and chloramphenicol. When the OD₆₀₀ of the culture reached 0.9, 1 mM of IPTG was added to each flask. After 20 hrs of growth at 37° C., 20 mL of ethyl acetate (with 1% of acetic acid, v/v) was added to each flask to extract the fatty alcohols produced during the fermentation. The crude ethyl acetate extract was directly analyzed with GC/MS as described herein.

[0369] The yjgB knockout strain resulted in significant accumulation of dodecanal and a lower fatty alcohol titer (FIG. 29). The expression of yjgB from plasmid pETDuet-1-'tesA-yjgB in the yjgB knockout strain effectively removed the accumulation of dodecanal (FIG. 29). Dodecanal accumulated in the yjgB knockout strain, but it was not observed in either the wild-type strain (MG1655(DE3, ΔfadD)) or the yjgB knockout strain with the yjgB expression plasmid. The arrows in FIG. 29 indicate the GC trace of dodecanal (C12:0 aldehyde).

[0370] This data confirms that YjgB was involved in converting dodecanal into dodecanol, although there may be other alcohol dehydrogenase(s) present in E. coli to convert other aldehydes into alcohols.

### Confirming YahK as a Fatty Alcohol Biosynthetic Polypeptide

[0371] To verify that YahK was indeed an alcohol dehydrogenase, yahK was knocked out in E. coli MG1655(DE3, ΔfadD, ΔyjgB) (control strain). The yahK knock-out strain MG1655(DE3, ΔfadD, Δyjg,B ΔyahK) was constructed with the lambda red system (Datsenko et al., supra) using the following primers: yahK_F: (CATATCAGGCGTTGCCAAATACACATAGCTAATCAGGAGTAAACACAATG) (SEQ ID NO:231); and yahK_R: (AATCGCACACTAACAGACTGAAAAAATTAATA AATACCCTGTGGTTTAAC) (SEQ ID NO:232).

[0372] This ΔyahK strain and the control strain, both expressing the acyl-ACP reductase YP_{—}400611, were cultured under conditions described above. Cell free lysates were made from both strains, and each lysate was assayed for fatty alcohol biosynthetic activity as discussed above.

[0373] The ΔyahK strain did not convert dodecanal to dodecanol, while the wild type strain had this activity. For additional verification, each lysate was run on a HiTrapQ column as described above. The wild type lysate appeared to have fatty alcohol biosynthetic activity in fractions eluting around 350 mM NaCl, while the ΔyahK lysate appeared to have no fatty alcohol biosynthetic activity in this region.

### Example 5

[0374] This Example Describes the Identification of Further Fatty Alcohol Biosynthetic Polypeptides in E. coli

### Bioinformatics

[0375] It was reasoned that potential fatty alcohol biosynthetic polypeptides in E. coli were most likely members of the following four protein families: Zn-dependent alcohol dehydrogenases (Pfam 00107 and 08240), Fe-dependent alcohol dehydrogenases (Pfam 00465), aldo-keto reductases (Pfam 00248) and short-chain dehydrogenases (Pfam 00106) (Pfam=protein family according to “pfam.sanger.ac.uk”). Further protein families that were likely to include potential alcohol biosynthetic polypeptides in E. coli may include, for example, the dehydroquinone synthase family (Pfam 01761), the phosphogluconate dehydrogenase family (Pfam 03446), the hydroxyacid dehydrogenase family (Pfam 02826, Pfam 00389), the aldehyde dehydrogenase family (Pfam 00171), the glutamyl-tRNA reductase family (Pfam 01488, Pfam 08501), the GFO/IDH/MOCA family (Pfam 01408, Pfam 02894), the mannitol dehydrogenase family (Pfam 01232, Pfam 08125), the IMP dehydrogenase family (Pfam 00478), the oxidoreductase family (Pfam 10722), the epimerase family (Pfam 001370), the alcohol oxidase family (Pfam 00732, Pfam 05199), the PQQ dehydrogenase family (Pfam 01011), the xanthine dehydrogenase family (Pfam 00941), the FAD/NAD(P)-binding oxidoreductase family (Pfam 01266), the flavin/NADH-binding oxidoreductase family (Pfam 01613), the FAD-linked oxidoreductase family (Pfam 01565, Pfam 02913), the ferredoxin reductase family (Pfam 00175, Pfam 00970, Pfam 00111), the anaerobic dehydrogenase family (Pfam 00384, Pfam 01568), the molybdenum-binding oxidoreductase family (Pfam 01315, Pfam 02738), the DMSO reductase family (Pfam 02976), the nitroreductase family (Pfam 00881), the FeS-binding oxidoreductase family (Pfam 00037, Pfam 07992), another oxidoreductase family (Pfam 00037, Pfam 01558, Pfam 01855, Pfam 02775, Pfam 10371), the Fe—S oxidoreductase family (Pfam 04055), the NADH-ubiquinone oxidoreductase family (Pfam 02508), the NAD(P)H:quinine oxidoreductase family (Pfam 05368), the NADH:ubiquinone oxidoreductase family (Pfam 01512, Pfam 10531, Pfam 10589), the glutathione reductase family (Pfam 02852, Pfam 07992), or a number of other predicted oxidoreductase families including, for example those within Pfam 03006, Pfam 03960, Pfam 00070. The potential families from which a fatty alcohol biosynthetic polypeptide of E. coli can be isolated are listed in Table 10 below.

TABLE 10
Protein families that may contain additional Fatty Alcohol Biosynthetic Polypeptides

| | | | |
|---|---|---|---|
| Gene | | | |
| (example) | Paralogs | Function | Pfam |

NAD(P) dependent

| | | | | |
|---|---|---|---|---|
| yiaE | 5 | oxidize/reduce 2-keto-carboxylic acids to 2- | pfam02826 | pfam00389 |
| B3553 | | hydroxy carboxylic acids | | |
| YdcW, | 14 | aldehyde dehydrogenase family (oxidize | pfam00171 | |
| AstD | | aldehydes to carboxylic acids) | | |
| AroE | 3 | dehydroshikimate reductase, NAD(P)-binding | pfam01488 | pfam08501 |
| yihU | 6 | predicted oxidoreductase with NAD(P)-binding | pfam03446 | |
| | | Rossmann-fold domain | | |
| mviM | 6 | predicted oxidoreductase with NAD(P)-binding | pfam01408 | pfam02894 |
| | | Rossmann-fold domain | | |
| uxuB | 5 | D-mannonate oxidoreductase, NAD-binding, | pfam01232 | pfam08125 |
| | | Rossman-type fold | | |
| yciW | 1 | predicted oxidoreductase | — | |
| ybjN | 1 | predicted oxidoreductase | pfam10722 | |
| gale | 11 | Epimerase, Rossman-fold | pfam01370 | |
| guaB/C | 2 | IMP dehydrogenase/GMP reductase | pfam00478 | |

Alcohol Oxidase (Flavo), NAD independent

| | | | | |
|---|---|---|---|---|
| BetA | 1 | choline to betaine aldehyde, cholin DH, | pfam00732 | pfam05199 |
| | | Flavoprotein, O2-dep. | | |

PQQ Dehydrogenase, NAD independent

| | | | |
|---|---|---|---|
| YfgL | 3 | outer membrane protein assembly | pfam01011 |
| YghJ | | predicted inner membrane lipoprotein | |
| gcd | | glucose dehydrogenase | |

Other:

| | | | | |
|---|---|---|---|---|
| xdhB | 3 | xanthine dehydrogenase, FAD-binding subunit | pfam00941 | |
| fixC | 18 | predicted oxidoreductase with FAD/NAD(P)- | pfam01266 | |
| | | binding domain | | |
| ycdH | 2 | predicted oxidoreductase, flavin:NADH | pfam01613 | |
| | | component | | |
| ydiJ | 6 | predicted FAD-linked oxidoreductase (6/3) | pfam01565 | pfam02913 |
| cbrA | 4 | predicted oxidoreductase with FAD/NAD(P)- | pfam01494 | |
| | | binding domain | | |
| hcr | 9 | ferredoxin(flavodoxin)-NADPH reductase | pfam00175 | pfam00970 |
| | | (7/6/9) | | pfam00111 |
| ydeP | 14 | Anaerobic dehydrogenases, typically | pfam00384 | pfam01568 |
| | | selenocysteine-containing, molybdenum | | |
| | | (13/14) | | |
| yagR | 3 | predicted oxidoreductase with molybdenum- | pfam01315 | pfam02738 |
| | | binding domain | | |
| ynfH | 2 | oxidoreductase, membrane subunit, DMSO | pfam04976 | |
| | | reductase | | |
| ydjA | 4 | predicted oxidoreductase, nitroreductase (FAD | pfam00881 | |
| | | dep.) | | |
| aegA | 16 | fused predicted oxidoreductase: FeS binding | pfam00037 | pfam07992 |
| | | subunit/NAD/FAD-binding subunit | | |
| ydbK | ? | Acting on the aldehyde or oxo group of donors. | pfam00037 | pfam01558 |
| | | With an iron-sulfur protein as acceptor | | pfam01855 |
| | | | pfam02775 | pfam10371 |
| yhcC | 19 | predicted Fe—S oxidoreductase, radical SAM | pfam04055 | |
| | | protein | | |
| rsxE | 2 | NADH-ubiquinone oxidoreductase | pfam02508 | |
| ytfG | 1 | NAD(P)H:quinone oxidoreductase | pfam05368 | |
| nuoF/C | 1 | NADH:ubiquinone oxidoreductase | pfam01512 | pfam10531 |
| | | | | pfam10589 |
| gor | 4 | glutathione reductase, pyruvate dehydrogenase | pfam02852 | pfam07992 |
| | | complex: dihydrolipoamideDH (E3) | | |
| yqfA | 1 | predicted oxidoreductase, inner membrane | pfam03006 | |
| | | subunit, channel protein, hemolysin fam. | | |
| yfgD | | | pfam03960 | |
| ygfK | | | pfam00070 | |

[0376] The following 8 candidates were chosen for initial experimental analysis: yahK, yjgB, adhP, dkgA, dkgB, yhdH, ydjL, and yqhD (Table 12).

[0377] To determine if these genes could reduce fatty aldehydes to fatty alcohols, these 8 genes were cloned into a pET-Duet vector along with E. coli 'tesA. These genes were then transformed into E. coli (DE3) MG1655 ΔyjgBΔyahK cells. Next 3 mL overnight starter cultures were grown in LB with carbanecillin (100 mg/L) at 37° C. A control strain lacking a candidate alcohol dehydrogenase was also included in the experiment. 1 mL of each overnight culture was used to inoculate 50 mL of fresh LB with carbanecillin. The cultures were shaken at 37° C. until reaching an OD₆₀₀ of 0.8-1. The cultures were then transferred to 18° C., induced with 1 mM IPTG, and shaken overnight.

[0378] Cell free lysates were prepared by centrifuging the cultures at 4,000×g for 20 mins. The cultures were then resuspended in 1 mL of Bugbuster (Novagen) and gently shaken at room temperature for 5 min. The cell debris was removed by spinning at 15,000×g for 10 min. The resulting lysates were assayed for alcohol dehydrogenase activity by mixing 88 μL of lysate, 2 of 40 mM cis-11-hexadecenal in DMSO, and 10 μL of 20 mM NADPH. The samples were incubated at 37° C. for 30 min. and were then extracted with 100 μL of ethyl acetate. The extracts were analyzed using GC/MS.

[0379] All proteins showed significantly better conversion of cis-11-hexadecenal to cis-11-hexadecanol as compared with the 'TesA only control (see Table 11). These results were confirmed in assays using dodecanal instead of cis-11-hexadecenal as the substrate (see Table 11).

[0380] To investigate how these enzymes contribute to fatty alcohol dehydrogenase activity in E. coil under production conditions, first the yjgB yahK double knock-out strain in MG1655(DE3, ΔfadD) (described above) was tested by transforming it with a plasmid expressing acyl-ACP reductase YP_{—}400611 and analyzing fatty aldehyde and fatty alcohol titers. The test strain also contained a plasmid expressing a decarbonylase. This double knock-out mutant showed slightly higher fatty aldehyde titers in several experiments (see, e.g., FIG. 30), confirming that these two putative alcohol dehydrogenases contribute to fatty alcohol dehydrogenase activity in E. coli under production conditions. Next, two additional genes, yncB and ydjA, were deleted in the yjgB yahK double mutant. YdjA, which is not a member of the four protein families mentioned above, demonstrated slightly elevated fatty aldehyde levels (see FIG. 30), indicating that it may also contribute to fatty alcohol dehydrogenase activity in E. coli under production conditions.

### Overexpression of Select Fatty Alcohol Biosynthetic Polypeptide Candidates

[0381] Additionally, the active fatty alcohol dehydrogenases from Table 11 were also deleted in MG1655 (DE3, ΔfadD, Δyjg,B ΔyahK) and tested as described above. Several of these deletion strains showed slightly elevated fatty aldehyde levels, suggesting that these may also contribute to fatty alcohol dehydrogenase activity in E. coli under production conditions (see FIG. 31).

TABLE 11
Overexpression of putative fatty alcohol dehydrogenase genes

| | GC/MS Assay | | NADPH assay |
|---|---|---|---|
| | % conversion to corresponding alcohol | | Initial rate (slope) |
| Substrate | Dodecanal | cis 11-hexadecanal | cis 11-hexadecenal |
| Overexpression | | | |
| None | 9 | 12 | 0.2 |
| YjgB | 54 | 89 | 24.8 |
| YahK | 47 | 87 | 28.3 |
| AdhP | 52 | 45 | 4.1 |
| YdjL | 51 | 23 | 0.14 |
| YhdH | 59 | 74 | 13.7 |
| YqhD | 55 | 23 | 7.3 |
| YafB (dkgB) | 52 | 65 | 9.4 |
| YqhE (dkgA) | 45 | 50 | 9.6 |

### Example 6

[0382] This example describes an overexpression study of a more comprehensive set of putative fatty alcohol biosynthetic polypeptides in E. coli

[0383] A larger and more comprehensive set of putative fatty alcohol biosynthetic polypeptides were selected for an overexpression study to identify the members of various protein families that contribute to the reduction of fatty aldehydes to fatty alcohols in E. coli. Specifically, each of the fatty alcohol biosynthetic genes in Table 12 below were overexpressed and analyzed for fatty aldehyde conversion and/or fatty alcohol production.

TABLE 12
Putative Fatty Alcohol Biosynthetic Genes That Were
Overexpressed (including members of the 4 families
mentioned above, with the most likely candidates
for fatty alcohol biosynthetic genes)

| Alcohol Dehydrogenases | Pfam |
|---|---|
| Zn-dependent (17) | |
| yjgB | 00107, 08240 |
| yahK | 00107, 08240 |
| adhP | 00107, 08240 |
| ydjL | 00107, 08240 |
| ydjJ | 00107, 08240 |
| yjgV (idnD) | 00107, 08240 |
| tdh | 00107, 08240 |
| yjjN | 00107, 08240 |
| rspB | 00107, 08240 |
| gatD | 00107, 08240 |
| yphC | 00107, 08240 |
| yhdH | 00107, 08240 |
| ycjQ | 00107 |
| yncB | 00107 |
| QOR | 00107, 08240 |
| ADH3 (frmA) | 00107, 08240 |
| ybdR | 00107, 08240 |
| yggP | 00107, 08240 |
| Fe-dependent (5) | |
| yiaY | 00465 |
| fucO | 00465 |
| eutG | 00465 |
| yqhD | 00465 |
| adhE | 00465 |
| Aldo-Keto Reductase (9) | |
| yafB (dkgB) | 00248 |
| ydjG | 00248 |
| yeaE | 00248 |
| yqhE (dkgA) | 00248 |
| yajO | 00248 |
| yghZ | 00248 |
| tas | 00248 |
| ydhF | 00248 |
| ydbC | 00248 |
| | Pfam |
| Short-Chain Dehydrogenase | |
| ybbO | pfam00106 |
| yohF | pfam00106 |
| yciK | pfam00106 |
| ygfF | pfam00106 |
| yghA | pfam00106 |
| yjgI | pfam00106 |
| ydfG | pfam00106 |
| ygcW | pfam00106 |
| ucpA | pfam00106 |
| entA | pfam00106 |
| folM | pfam00106 |
| hdhA | pfam00106 |
| hcaB | pfam00106 |
| srlD | pfam00106 |
| kduD | pfam00106 |
| idnO | pfam00106 |
| fabG | pfam00106 |
| fabI | pfam00106 |
| DHQ Synthase | |
| ybdH | pfam01761 |
| gldA | pfam01761 |
| aroB | pfam01761 |

[0384] Each gene was cloned into the expression vector OP-80 (SEQ ID NO:233), which was digested with the restriction enzymes NcoI and EcoRI. The genes were amplified using PCR from E. coli MG1655 genomic DNA using the primers listed in Table 13.

TABLE 13
primers

| Name | Sequence |
|---|---|
| adhE_f | TAAGGAGGAATAAACCATGGCTGTTACTAATGTCGCTGAACTTAACGC |
| | (SEQ ID NO: 234) |
| adhE_r | CGGGCCCAAGCTTCGAATTTTAAGCGGATTTTTTCGCTTTTTTCTCAGCTTTAGC |
| | (SEQ ID NO: 235) |
| adhP_f | TAAGGAGGAATAAACCATGAAGGCTGCAGTTGTTACGAAGGATCATC |
| | (SEQ ID NO: 236) |
| adhP_r | CGGGCCCAAGCTTCGAATTTTAGTGACGGAAATCAATCACCATGCGGC |
| | (SEQ ID NO: 237) |
| aroB_f | TAAGGAGGAATAAACCATGGAGAGGATTGTCGTTACTCTCGGGG |
| | (SEQ ID NO: 238) |
| aroB_r | CGGGCCCAAGCTTCGAATTTTACGCTGATTGACAATCGGCAATGGC |
| | (SEQ ID NO: 239) |
| dkgA_f | TAAGGAGGAATAAACCATGGCTAATCCAACCGTTATTAAGCTACAGGATG |
| | (SEQ ID NO: 240) |
| dkgA_r | CGGGCCCAAGCTTCGAATTTTAGCCGCCGAACTGGTCAGGATCGG |
| | (SEQ ID NO: 241) |
| dkgB_f | TAAGGAGGAATAAACCATGGCTATCCCTGCATTTGGTTTAGGTAC |
| | (SEQ ID NO: 242) |
| dkgB_r | CGGGCCCAAGCTTCGAATTTTAATCCCATTCAGGAGCCAGACCTTC |
| | (SEQ ID NO: 243) |
| entA_f | TAAGGAGGAATAAACCATGGATTTCAGCGGTAAAAATGTCTGGGTAAC |
| | (SEQ ID NO: 244) |
| entA_r | CGGGCCCAAGCTTCGAATTTTATGCCCCCAGCGTTGAGCC |
| | (SEQ ID NO: 245) |
| eutG_f | TAAGGAGGAATAAACCATGCAAAATGAATTGCAGACCGCGCTC |
| | (SEQ ID NO: 246) |
| eutG_r | CGGGCCCAAGCTTCGAATTTTATTGCGCCGCTGCGTACAGG |
| | (SEQ ID NO: 247) |
| fabI_f | TAAGGAGGAATAAACCATGGGTTTTCTTTCCGGTAAGCGCATTC |
| | (SEQ ID NO: 248) |
| fabI_r | CGGGCCCAAGCTTCGAATTTTATTTCAGTTCGAGTTCGTTCATTGCAGCAATG |
| | (SEQ ID NO: 249) |
| folM_f | TAAGGAGGAATAAACCATGGGTAAAACCCAGCCCTTGCCAATATTAATTAC |
| | (SEQ ID NO: 250) |
| folM_r | CGGGCCCAAGCTTCGAATTTTAACGCAGATGACGACCGCCATC |
| | (SEQ ID NO: 251) |
| frmA_f | TAAGGAGGAATAAACCATGAAATCACGTGCTGCCGTTGCATTTG |
| | (SEQ ID NO: 252) |
| frmA_r | CGGGCCCAAGCTTCGAATTTCAGTAACGAATTACGGTTCGAATGGATTTGCC |
| | (SEQ ID NO: 253) |
| fucO_f | TAAGGAGGAATAAACCATGATGGCTAACAGAATGATTCTGAACGAAACGG |
| | (SEQ ID NO: 254) |
| fucO_r | CGGGCCCAAGCTTCGAATTTTACCAGGCGGTATGGTAAAGCTCTACAATATCC |
| | (SEQ ID NO: 255) |
| gatD_f | TAAGGAGGAATAAACCATGAAATCAGTGGTGAATGATACTGATGGTATCGTG |
| | (SEQ ID NO: 256) |
| gatD_r | CGGGCCCAAGCTTCGAATTTCAGGGAATGAGCAACACTTTGCCC |
| | (SEQ ID NO: 257) |
| gldA_f | TAAGGAGGAATAAACCATGGACCGCATTATTCAATCACCGGGTAAATAC |
| | (SEQ ID NO: 258) |
| gldA_r | CGGGCCCAAGCTTCGAATTTTATTCCCACTCTTGCAGGAAACGCTGAC |
| | (SEQ ID NO: 259) |
| hdhA_f | TAAGGAGGAATAAACCGTGTTTAATTCTGACAACCTGAGACTCGACG |
| | (SEQ ID NO: 260) |
| hdhA_r | CGGGCCCAAGCTTCGAATTTTAATTGAGCTCCTGTACCCCACCACC |
| | (SEQ ID NO: 261) |
| idnD_f | TAAGGAGGAATAAACCATGCAAGTGAAAACACAGTCCTGCGTTG |
| | (SEQ ID NO: 262) |
| idnD_r | CGGGCCCAAGCTTCGAATTTTAGAAAACAAGCTGGACTTTTGCTGCCTG |
| | (SEQ ID NO: 263) |
| idnO_f | TAAGGAGGAATAAACCATGAACGATCTATTTTCACTGGCAGGAAAAAATATCTTGATTAC |
| | (SEQ ID NO: 264) |
| idnO_r | CGGGCCCAAGCTTCGAATTTTAAACAGCCACTAACATGCCGCCATC |
| | (SEQ ID NO: 265) |
| kduD_f | TAAGGAGGAATAAACCATGATTTTAAGTGCATTTTCTCTCGAAGGTAAAGTTGCG |
| | (SEQ ID NO: 266) |
| kduD_r | CGGGCCCAAGCTTCGAATTTTAACGCGCCAGCCAACCG |
| | (SEQ ID NO: 267) |
| qor_f | TAAGGAGGAATAAACCATGGCAACACGAATTGAATTTCACAAGCACG |
| | (SEQ ID NO: 268) |
| qor_r | CGGGCCCAAGCTTCGAATTTTATGGAATCAGCAGGCTGGAACCTTG |
| | (SEQ ID NO: 269) |
| rspB_f | TAAGGAGGAATAAACCATGAAAAGCATATTAATTGAAAAACCGAATCAACTGGC |
| | (SEQ ID NO: 270) |
| rspB_r | CGGGCCCAAGCTTCGAATTTATTCAGAAAAAGTGAGTAAGACTTTGCAGCAATGTTTTTG |
| | (SEQ ID NO: 271) |
| srlD_f | TAAGGAGGAATAAACCATGAATCAGGTTGCCGTTGTCATCGG |
| | (SEQ ID NO: 272) |
| srlD_r | CGGGCCCAAGCTTCGAATTTCAGAACATCACCTGACCGCCG |
| | (SEQ ID NO: 273) |
| tdh_f | TAAGGAGGAATAAACCATGAAAGCGTTATCCAAACTGAAAGCGGAAG |
| | (SEQ ID NO: 274) |
| tdh_r | CGGGCCCAAGCTTCGAATTTTAATCCCAGCTCAGAATAACTTTCCCGGAC |
| | (SEQ ID NO: 275) |
| ucpA_f | TAAGGAGGAATAAACCATGGGTAAACTCACGGGCAAGACAG |
| | (SEQ ID NO: 276) |
| ucpA_r | CGGGCCCAAGCTTCGAATTTCAGATACCGACGCTAACCGTCTCC |
| | (SEQ ID NO: 277) |
| yahK_f | TAAGGAGGAATAAACCATGAAGATCAAAGCTGTTGGTGCATATTCCG |
| | (SEQ ID NO: 278) |
| yahK_r | CGGGCCCAAGCTTCGAATTTCAGTCTGTTAGTGTGCGATTATCGATAACAAAACG |
| | (SEQ ID NO: 279) |
| yajO_f | TAAGGAGGAATAAACCATGCAATACAACCCCTTAGGAAAAACCGAC |
| | (SEQ ID NO: 280) |
| yajO_r | CGGGCCCAAGCTTCGAATTTTATTTAAATCCTACGACAGGATGCGGTTTATACGG |
| | (SEQ ID NO: 281) |
| ybbO_f | TAAGGAGGAATAAACCATGACTCATAAAGCAACGGAGATCCTGACAG |
| | (SEQ ID NO: 282) |
| ybbO_r | CGGGCCCAAGCTTCGAATTTCACCCCTGCAATATTTTGTCCATCACG |
| | (SEQ ID NO: 283) |
| ybdH_f | TAAGGAGGAATAAACCATGCCTCACAATCCTATCCGCGTG |
| | (SEQ ID NO: 284) |
| ybdH_r | CGGGCCCAAGCTTCGAATTTCAGGCTTTAAACGATTCCACTTTTTTGAACGC |
| | (SEQ ID NO: 285) |
| ybdR_f | TAAGGAGGAATAAACCATGAAAGCATTGACTTATCACGGCCCAC |
| | (SEQ ID NO: 286) |
| ybdR_r | CGGGCCCAAGCTTCGAATTTCATATTGTTCCCCCCGGCATCG |
| | (SEQ ID NO: 287) |
| yciK_f | TAAGGAGGAATAAACCATGCATTACCAGCCAAAACAAGATTTACTCAATGATC |
| | (SEQ ID NO: 288) |
| yciK_r | CGGGCCCAAGCTTCGAATTTCATTGGGAAATTCCTGGTTTACGGCC |
| | (SEQ ID NO: 289) |
| ycjQ_f | TAAGGAGGAATAAACCATGAAAAAGTTAGTAGCCACAGCACCGC |
| | (SEQ ID NO: 290) |
| ycjQ_r | CGGGCCCAAGCTTCGAATTTTAAAACGTAACGCCCATTTTGATGCTCTGTTC |
| | (SEQ ID NO: 291) |
| ydbC_f | TAAGGAGGAATAAACCATGAGCAGCAATACATTTACTCTCGGTACAAAATC |
| | (SEQ ID NO: 292) |
| ydbC_r | CGGGCCCAAGCTTCGAATTTTATTCTCGCGAAATACCATCCAACGTAGACAAC |
| | (SEQ ID NO: 293) |
| ydfG_f | TAAGGAGGAATAAACCATGATCGTTTTAGTAACTGGAGCAACGGCAG |
| | (SEQ ID NO: 294) |
| ydfG_r | CGGGCCCAAGCTTCGAATTTTACTGACGGTGGACATTCAGTCCG |
| | (SEQ ID NO: 295) |
| ydhF_f | TAAGGAGGAATAAACCATGGTTCAGCGTATTACTATTGCGCCG |
| | (SEQ ID NO: 296) |
| ydhF_r | CGGGCCCAAGCTTCGAATTTTACGGTACGTCGTACCCCAGTG |
| | (SEQ ID NO: 297) |
| ydjG_f | TAAGGAGGAATAAACCATGAAAAAGATACCTTTAGGCACAACGGATATTACGC |
| | (SEQ ID NO: 298) |
| ydjG_r | CGGGCCCAAGCTTCGAATTTTAACGCTCCAGGGCCTCTGC |
| | (SEQ ID NO: 299) |
| ydjJ_f | TAAGGAGGAATAAACCATGAAAAATTCAAAAGCAATATTGCAGGTGCCG |
| | (SEQ ID NO: 300) |
| ydjJ_r | CGGGCCCAAGCTTCGAATTAATCGCTAATTTTAATAACGCCTTTAATAATGTCGCGTTTG |
| | (SEQ ID NO: 301) |
| ydjL_f | TAAGGAGGAATAAACCATGAAAGCACTGGCTCGGTTTGGC |
| | (SEQ ID NO: 302) |
| ydjL_r | CGGGCCCAAGCTTCGAATTTTATTCATCAAAGTCGTAAGTCATGATCACTTTGATTGCG |
| | (SEQ ID NO: 303) |
| yeaE_f | TAAGGAGGAATAAACCATGCAACAAAAAATGATTCAATTTAGTGGCGATGTCTC |
| | (SEQ ID NO: 304) |
| yeaE_r | CGGGCCCAAGCTTCGAATTTCACACCATATCCAGCGCAGTTTTTCC |
| | (SEQ ID NO: 305) |
| ygcW_f | TAAGGAGGAATAAACCATGTCAATCGAATCTCTCAATGCGTTCTCAATG |
| | (SEQ ID NO: 306) |
| ygcW_r | CGGGCCCAAGCTTCGAATTTTAGCGCACTAAATAACCGCCATCAACC |
| | (SEQ ID NO: 307) |
| ygfF_f | TAAGGAGGAATAAACCATGGCTATAGCACTTGTGACTGGTGG |
| | (SEQ ID NO: 308) |
| ygfF_r | CGGGCCCAAGCTTCGAATTTTATTTCCCGCCCGCCAAATCG |
| | (SEQ ID NO: 309) |
| yggP_f | TAAGGAGGAATAAACCATGAAAACCAAAGTTGCTGCTATTTATGGCAAGC |
| | (SEQ ID NO: 310) |
| yggP_r | CGGGCCCAAGCTTCGAATTTCATTGCGCGGCCTCCC |
| | (SEQ ID NO: 311) |
| yghA_f | TAAGGAGGAATAAACCATGTCTCATTTAAAAGACCCGACCACGCAG |
| | (SEQ ID NO: 312) |
| yghA_r | CGGGCCCAAGCTTCGAATTTTAACCTAAATGCTCGCCGCCG |
| | (SEQ ID NO: 313) |
| yghZ_f | TAAGGAGGAATAAACCATGGTCTGGTTAGCGAATCCCGAAC |
| | (SEQ ID NO: 314) |
| yghZ_r | CGGGCCCAAGCTTCGAATTTCATTTATCGGAAGACGCCTGCCAC |
| | (SEQ ID NO: 315) |
| yhdH_f | TAAGGAGGAATAAACCATGCAGGCGTTACTTTTAGAACAGCAGG |
| | (SEQ ID NO: 316) |
| yhdH_r | CGGGCCCAAGCTTCGAATTTTAGTTAACCTTCACCAGCGTGCGAC |
| | (SEQ ID NO: 317) |
| yiaY_f | TAAGGAGGAATAAACCATGGCAGCTTCAACGTTCTTTATTCCTTCTG |
| | (SEQ ID NO:3 18) |
| yiaY_r | CGGGCCCAAGCTTCGAATTTTACATCGCTGCGCGATAAATCGCC |
| | (SEQ ID NO: 319) |
| yjgB_f | TAAGGAGGAATAAACCATGTCGATGATAAAAAGCTATGCCGCAAAAGAAG |
| | (SEQ ID NO: 320) |
| yjgB_r | CGGGCCCAAGCTTCGAATTTCAAAAATCGGCTTTCAACACCACGC |
| | (SEQ ID NO: 321) |
| yjgI_f | TAAGGAGGAATAAACCATGGGCGCTTTTACAGGTAAGACAGTTC |
| | (SEQ ID NO: 322) |
| yjgI_r | CGGGCCCAAGCTTCGAATTTTATGCGCCAAACGCGCCATC |
| | (SEQ ID NO: 323) |
| yjjN_f | TAAGGAGGAATAAACCATGTCTACGATGAATGTTTTAATTTGCCAGCAGC |
| | (SEQ ID NO: 324) |
| yjjN_r | CGGGCCCAAGCTTCGAATTTCAGAAAGTAATTACGCCTTTAATTAACTCACGATTGTTAA |
| | (SEQ ID NO: 325) |
| yncB_f | TAAGGAGGAATAAACCATGGGGCAACAAAAGCAGCGTAATC |
| | (SEQ ID NO: 326) |
| yncB_r | CGGGCCCAAGCTTCGAATTTTAATCATCACCCGCCACGCG |
| | (SEQ ID NO: 327) |
| yohF_f | TAAGGAGGAATAAACCATGGCACAGGTTGCGATTATTACCGC |
| | (SEQ ID NO: 328) |
| yohF_r | CGGGCCCAAGCTTCGAATTCTATTCTGGGTTGAACTGTGGATTCGCC |
| | (SEQ ID NO: 329) |
| tas_f | TAAGGAGGAATAAACCATGCAATATCACCGTATACCCCACAGTTCG |
| | (SEQ ID NO: 330) |
| tas_r | CGGGCCCAAGCTTCGAATTTTATGGTGCCGGATAAGTATAAACCTGATGCAC |
| | (SEQ ID NO: 331) |
| hcaB_f | TAAGGAGGAATAAACCATGAGCGATCTGCATAACGAGTCCATTTTTATTAC |
| | (SEQ ID NO: 332) |
| hcaB_r | CGGGCCCAAGCTTCGAATTTTAAAGATCCAGCCCAGCCGCTAC |
| | (SEQ ID NO: 333) |
| fabG_f | TAAGGAGGAATAAACCATGAATTTTGAAGGAAAAATCGCACTGGTAACCG |
| | (SEQ ID NO: 334) |
| fabG_r | CGGGCCCAAGCTTCGAATTTCAGACCATGTACATCCCGCCG |
| | (SEQ ID NO: 335) |
| yphC_f | TAAGGAGGAATAAACCATGAAAACGATGCTGGCAGCTTATTTACCAG |
| | (SEQ ID NO: 336) |
| yphC_r | CGGGCCCAAGCTTCGAATTTTAATCCGGGAAGTTAATCACAACTTTCCCGC |
| | (SEQ ID NO: 337) |
| yqhD_f | TAAGGAGGAATAAACCATGAACAACTTTAATCTGCACACCCCAACC |
| | (SEQ ID NO: 338) |
| yqhD_r | CGGGCCCAAGCTTCGAATTTTAGCGGGCGGCTTCGTATATACG |
| | (SEQ ID NO: 339) |

[0385] Each primer was designed to contain 15 bases of overlap with the expression vector, enabling restrictionless cloning using the InFusion cloning kit (Clontech). Excess nucleotides and primers were removed from the PCR products using the ZR-96 DCC kit (Zymo Research). After ligation of the PCR products into the linearized OP-80, the resulting DNA was transformed into NEB Turbo competent cells (New England Biolabs, Inc. Ipswich, Mass.), and plated onto LB agar medium supplemented with 100 μg/mL spectinomycin and 1% (w/v) glucose. Plasmid clones containing the appropriate inserts were identified using PCR, verified by sequencing and mini-prepped.

[0386] The sequence verified plasmids were transformed into the expression strain, E. coli (DE3) ΔyjgB yahK ΔydhD ΔdkgA, and plated onto LB agar medium supplemented with 100 μg/mL spectinomycin and 1% (w/v) glucose. Individual colonies were picked and grown overnight at 37° C. in LB liquid medium supplemented with 100 μg/mL spectinomycin and 1% (w/v) glucose. The culture was then diluted 1:1000 into fresh LB with 100 μg/mL spectinomycin and 1% (w/v) glucose and grown in a shaker for 5-6 hours at 37° C. The culture was then induced with 1 mM isopropyl β-D-1-thiogalactopyranoside (IPTG) and grown in a shaker for 18 hours at 18° C.

[0387] The cells were subsequently harvested by centrifugation for 10 minutes at 4,500 rpm. The supernatant was discarded and the cells were resuspended in 2.5 mL BugBuster lysis reagent (Novagen). The cell suspensions were placed on a vertical rotator for 45 minutes at 4° C. to lyse the cells. Cell debris were removed by centrifugation for 10 minutes at 4,500 rpm, and the clarified lysates were used for activity assays.

[0388] Each sample was evaluated in vitro to determine its ability to convert dodecanal or 11-cis-hexadecenal into dodecanol or 11-cis-hexadecenol, respectively, using the cell lysates as described above. The negative control consisted of a lysate prepared from cells transformed with an empty OP-80 expression vector.

[0389] Each reaction contained 5-40 μL of cell lysate, 20 μL 20 mM dodecanal or 11-cis-hexadecenal, 10 μL 20 mM NADH or NADPH, and sufficient dilution buffer (100 mM sodium phosphate, pH 7.0, 0.25% (v/v) Triton X-100) to bring the total volume to 400 μL. The mixture was incubated for 2 hours at 37° C. with constant shaking at 250 rpm.

[0390] To prepare samples for analysis, 40 μL 1 M HCl and 400 μL butyl acetate was added. Tetracosane (a C₂₋₄ alkane) was added as an internal standard (at 500 mg/L). The mixture was shaken for 15 minutes at 2,000 rpm, then centrifuged at 4,500 rpm for 10 minutes at 20° C.

[0391] A 50 μL sample of the organic phase was derivatized with BSTFA (N,O-bis(trimethylsilyl)trifluoroacetamide) and analyzed on a GC/FID equipped with a Trace UFC-1 column (Thermo Scientific). Samples were run using a split ratio of 1:300 and a program consisting of an initial temperature of 140° C. for 0.3 minute, a ramp up of 150° C./min to 300° C., then holding at a constant temperature of 300° C. for 0.05 minutes.

[0392] The percentage of aldehyde substrate that had been converted to alcohol was calculated for each sample, and a paired t-test was used to identify candidates that had converted the most aldehyde into alcohol as compared to the negative control, using a p value of less than or equal to about 0.05. The candidate that displayed statistically significant levels of fatty alcohol biosynthetic enzyme activity were identified and listed below in Table 14.

TABLE 14
Fatty alcohol biosynthetic polypeptides identified
using various substrates
Fatty Alcohol Biosynthetic Polypeptides Identified
Using Dodecanal and NADH
adhP
dkgA
ydjJ
ygdS (Tas)
yjgB
Fatty Alcohol Biosynthetic Polypeptides Identified
Using Dodecanal and NADPH
adhP
dkgA
dkgB
rspB
yahK
ybbO
ybdH
ybdR
ygfF
yhdH
yjgB
Fatty Alcohol Biosynthetic Polypeptides Identified
using 11-cis-hexadecenal & NADH
yjgB
Fatty Alcohol Biosynthetic Polypeptides Identified
Using 11-cis-hexadecenal and NADPH
adhP
aroB
rspB
yahK
ybbO
ybdH
ygfF
ybdR
ydbC
ydjG
yeaE
yhdH
yjgB
yncB

The application's sequence listing, which the Patent Office published only in electronic form, follows.

SEQUENCE LISTING (339 sequences)

SEQ ID NO: 1 - protein, 336 aa, Escherichia coli
MKAAVVTKDHHVDVTYKTLRSLKHGEALLKMECCGVCHTDLHVKNGDFGDKTGVILGHEGIGVVAEVGPGVTSLKPGDRASVAWFYEGCGHCEYCNSGNETLCRSVKNAGYSVDGGMAEECIVVADYAVKVPDGLDSAAASSITCAGVTTYKAVKLSKIRPGQWIAIYGLGGLGNLALQYAKNVFNAKVIAIDVNDEQLKLATEMGADLAINSHTEDAAKIVQEKTGGAHAAVVTAVAKAAFNSAVDAVRAGGRVVAVGLPPESMSLDIPRLVLDGIEVVGSLVGTRQDLTEAFQFAAEGKVVPKVALRPLADINTIFTEMEEGKIRGRMVIDFRH

SEQ ID NO: 2 - DNA, 1011 bp, Escherichia coli
atgaaggctgcagttgttacgaaggatcatcatgttgacgttacgtataaaacactgcgctcactgaaacatggcgaagccctgctgaaaatggagtgttgtggtgtatgtcataccgatcttcatgttaagaatggcgattttggtgacaaaaccggcgtaattctgggccatgaaggcatcggtgtggtggcagaagtgggtccaggtgtcacctcattaaaaccaggcgatcgtgccagcgtggcgtggttctacgaaggatgcggtcattgcgaatactgtaacagtggtaacgaaacgctctgccgttcagttaaaaatgccggatacagcgttgatggcgggatggcggaagagtgcatcgtggtcgccgattacgcggtaaaagtgccagatggtctggactcggcggcggccagcagcattacctgtgcgggagtcaccacctacaaagccgttaagctgtcaaaaattcgtccagggcagtggattgctatctacggtcttggcggtctgggtaacctcgccctgcaatacgcgaagaatgtctttaacgccaaagtgatcgccattgatgtcaatgatgagcagttaaaactggcaaccgaaatgggcgcagatttagcgattaactcacacaccgaagacgccgccaaaattgtgcaggagaaaactggtggcgctcacgctgcggtggtaacagcggtagctaaagctgcgtttaactcggcagttgatgctgtccgtgcaggcggtcgtgttgtggctgtcggtctaccgccggagtctatgagcctggatatcccacgtcttgtgctggatggtattgaagtggtcggttcgctggtcggcacgcgccaggatttaactgaagccttccagtttgccgccgaaggtaaagtggtgccgaaagtcgccctgcgtccgttagcggacatcaacaccatctttactgagatggaagaaggcaaaatccgtggccgcatggtgattgatttccgtcactaa

SEQ ID NO: 3 - protein, 275 aa, Escherichia coli
MANPTVIKLQDGNVMPQLGLGVWQASNEEVITAIQKALEVGYRSIDTAAAYKNEEGVGKALKNASVNREELFITTKLWNDDHKRPREALLDSLKKLQLDYIDLYLMHWPVPAIDHYVEAWKGMIELQKEGLIKSIGVCNFQIHHLQRLIDETGVTPVINQIELHPLMQQRQLHAWNATHKIQTESWSPLAQGGKGVFDQKVIRDLADKYGKTPAQIVIRWHLDSGLVVIPKSVTPSRIAENFDVWDFRLDKDELGEIAKLDQGKRLGPDPDQFGG

SEQ ID NO: 4 - DNA, 828 bp, Escherichia coli
atggctaatccaaccgttattaagctacaggatggcaatgtcatgccccagctgggactgggcgtctggcaagcaagtaatgaggaagtaatcaccgccattcaaaaagcgttagaagtgggttatcgctcgattgataccgccgcggcctacaagaacgaagaaggtgtcggcaaagccctgaaaaatgcctcagtcaacagagaagaactgttcatcaccactaagctgtggaacgacgaccacaagcgcccccgcgaagccctgctcgacagcctgaaaaaactccagcttgattatatcgacctctacttaatgcactggcccgttcccgctatcgaccattatgtcgaagcatggaaaggcatgatcgaattgcaaaaagagggattaatcaaaagcatcggcgtgtgcaacttccagatccatcacctgcaacgcctgattgatgaaactggcgtgacgcctgtgataaaccagatcgaacttcatccgctgatgcaacaacgccagctacacgcctggaacgcgacacacaaaatccagaccgaatcctggagcccattagcgcaaggagggaaaggcgttttcgatcagaaagtcattcgcgatctggcagataaatacggcaaaaccccggcgcagattgttatccgctggcatctggatagcggcctggtggtgatcccgaaatcggtcacaccttcacgtattgccgaaaactttgatgtctgggatttccgtctcgacaaagacgaactcggcgaaattgcaaaactcgatcagggcaagcgtctcggtcccgatcctgaccagttcggcggctaa

SEQ ID NO: 5 - protein, 267 aa, Escherichia coli
MAIPAFGLGTFRLKDDVVISSVITALELGYRAIDTAQIYDNEAAVGQAIAESGVPRHELYITTKIWIENLSKDKLIPSLKESLQKLRTDYVDLTLIHWPSPNDEVSVEEFMQALLEAKKQGLTREIGISNFTIPLMEKAIAAVGAENIATNQIELSPYLQNRKVVAWAKQHGIHITSYMTLAYGKALKDEVIARIAAKHNATPAQVILAWAMGEGYSVIPSSTKRKNLESNLKAQNLQLDAEDKKAIAALDCNDRLVSPEGLAPEWD

SEQ ID NO: 6 - DNA, 804 bp, Escherichia coli
atggctatccctgcatttggtttaggtactttccgtctgaaagacgacgttgttatttcatctgtgataacggcgcttgaacttggttatcgcgcaattgataccgcacaaatctatgataacgaagccgcagtaggtcaggcgattgcagaaagtggcgtgccacgtcatgaactctacatcaccactaaaatctggattgaaaatctcagcaaagacaaattgatcccaagtctgaaagagagcctgcaaaaattgcgtaccgattatgttgatctgacgctaatccactggccgtcaccaaacgatgaagtctctgttgaagagtttatgcaggcgctgctggaagccaaaaaacaagggctgacgcgtgagatcggtatttccaacttcacgatcccgttgatggaaaaagcgattgctgctgttggtgctgaaaacatcgctactaaccagattgaactctctccttatctgcaaaaccgtaaagtggttgcctgggctaaacagcacggcatccatattacttcctatatgacgctggcgtatggtaaggccctgaaagatgaggttattgctcgtatcgcagctaaacacaatgcgactccggcacaagtgattctggcgtgggctatgggggaaggttactcagtaattccttcttctactaaacgtaaaaacctggaaagtaatcttaaggcacaaaatttacagcttgatgccgaagataaaaaagcgatcgccgcactggattgcaacgaccgcctggttagcccggaaggtctggctcctgaatgggattaa

SEQ ID NO: 7 - protein, 339 aa, Escherichia coli
MKSILIEKPNQLAIVEREIPTPSAGEVRVKVKLAGICGSDSHIYRGHNPFAKYPRVIGHEFFGVIDAVGEGVESARVGERVAVDPVVSCGHCYPCSIGKPNVCTTLAVLGVHADGGFSEYAVVPAKNAWKIPEAVADQYAVMIEPFTIAANVTGHGQPTENDTVLVYGAGPIGLTIVQVLKGVYNVKNVIVADRIDERLEKAKESGADWAINNSQTPLGEIFTEKGIKPTLIIDAACHPSILKEAVTLASPAARIVLMGFSSEPSEVIQQGITGKELSIFSSRLNANKFPIVIDWLSKGLIKPEKLITHTFDFQHVADAISLFEQDQKHCCKVLLTFSE

SEQ ID NO: 8 - DNA, 1020 bp, Escherichia coli
atgaaaagcatattaattgaaaaaccgaatcaactggcgattgtcgaacgtgaaatacccaccccgtcagcgggtgaagtacgagtaaaagtgaaacttgccggaatttgtggttcagatagccatatttatcgtgggcataatccttttgcgaaatatccgcgcgtcattggtcatgaattctttggcgtcattgatgcagtgggtgaaggcgtggaaagcgccagagtcggtgaacgtgttgctgtcgatccggtggtcagctgtgggcattgctatccgtgctctataggtaaaccgaacgtttgtacgacactggctgtattaggtgtgcacgctgacggtggtttcagtgaatatgccgtggttccggcaaaaaatgcgtggaaaattcctgaagcagtggccgatcaatatgcggtaatgatcgaaccttttaccattgcggctaacgtaaccggacatggtcaaccgactgaaaatgataccgttctggtttatggtgccggtccaatcggcctgacgatcgttcaggtattaaaaggcgtctataacgttaaaaatgtgattgttgccgatcgcattgatgaacgactggaaaaagcgaaagagagcggggctgactgggcgattaataacagccagacaccgcttggcgagattttcactgaaaaaggcatcaagccgacattaattatcgatgcggcttgtcatccttctatcctgaaagaggccgtaacgctggcttctccagcggcacgtattgtattgatggggttctccagtgaaccgtctgaagtgattcagcaaggaattaccggaaaagaactctctattttctcttcacgcttaaatgcaaataaattcccgatcgttatcgactggttaagtaaagggttaattaaaccagaaaaattaattacccatacgtttgatttccagcatgttgctgatgccattagtttatttgaacaggatcaaaaacattgctgcaaagtcttactcactttttctgaataa

SEQ ID NO: 9 - protein, 349 aa, Escherichia coli
MKIKAVGAYSAKQPLEPMDITRREPGPNDVKIEIAYCGVCHSDLHQVRSEWAGTVYPCVPGHEIVGRVVAVGDQVEKYAPGDLVGVGCIVDSCKHCEECEDGLENYCDHMTGTYNSPTPDEPGHTLGGYSQQIVVHERYVLRIRHPQEQLAAVAPLLCAGITTYSPLRHWQAGPGKKVGVVGIGGLGHMGIKLAHAMGAHVVAFTTSEAKREAAKALGADEVVNSRNADEMAAHLKSFDFILNTVAAPHNLDDFTTLLKRDGTMTLVGAPATPHKSPEVFNLIMKRRAIAGSMIGGIPETQEMLDFCAEHGIVADIEMIRADQINEAYERMLRGDVKYRFVIDNRTLTD

SEQ ID NO: 10 - DNA, 1050 bp, Escherichia coli
atgaagatcaaagctgttggtgcatattccgctaaacaaccacttgaaccgatggatatcacccggcgtgaaccgggaccgaatgatgtcaaaatcgaaatcgcttactgtggcgtttgccattccgatctccaccaggtccgttccgagtgggcggggacggtttacccctgcgtgccgggtcatgaaattgtggggcgtgtggtagccgttggtgatcaggtagaaaaatatgcgccgggcgatctggtcggtgtcggctgcattgtcgacagttgtaaacattgcgaagagtgtgaagacgggttggaaaactactgtgatcacatgaccggcacctataactcgccgacgccggacgaaccgggccatactctgggcggctactcacaacagatcgtcgttcatgagcgatatgttctgcgtattcgtcacccgcaagagcagctggcggcggtggctcctttgttgtgtgcagggatcaccacgtattcgccgctacgtcactggcaggccgggccgggtaaaaaagtgggcgtggtcggcatcggcggtctgggacatatggggattaagctggcccacgcgatgggggcacatgtggtggcatttaccacttctgaggcaaaacgcgaagcggcaaaagccctgggggccgatgaagttgttaactcacgcaatgccgatgagatggcggctcatctgaagagtttcgatttcattttgaatacagtagctgcgccacataatctcgacgattttaccaccttgctgaagcgtgatggcaccatgacgctggttggtgcgcctgcgacaccgcataaatcgccggaagttttcaacctgatcatgaaacgccgtgcgatagccggttctatgattggcggcattccagaaactcaggagatgctcgatttttgcgccgaacatggcatcgtggctgatatagagatgattcgggccgatcaaattaatgaagcctatgagcgaatgctgcgcggtgatgtgaaatatcgttttgttatcgataatcgcacactaacagactga

SEQ ID NO: 11 - protein, 269 aa, Escherichia coli
MTHKATEILTGKVMQKSVLITGCSSGIGLESALELKRQGFHVLAGCRKPDDVERMNSMGFTGVLIDLDSPESVDRAADEVIALTDNCLYGIFNNAGFGMYGPLSTISRAQMEQQFSANFFGAHQLTMRLLPAMLPHGEGRIVMTSSVMGLISTPGRGAYAASKYALEAWSDALRMELRHSGIKVSLIEPGPIRTRFTDNVNQTQSDKPVENPGIAARFTLGPEAVVDKVRHAFISEKPKMRYPVTLVTWAVMVLKRLLPGRVMDKILQG

SEQ ID NO: 12 - DNA, 810 bp, Escherichia coli
atgactcataaagcaacggagatcctgacaggtaaagttatgcaaaaatcggtcttaattaccggatgttccagtggaattggcctggaaagcgcgctcgaattaaaacgccagggttttcatgtgctggcaggttgccggaaaccggatgatgttgagcgcatgaacagcatgggatttaccggcgtgttgatcgatctggattcaccagaaagtgttgatcgcgcagccgacgaggtgatcgccctgaccgataattgtctgtatgggatctttaacaatgccggattcggcatgtatggccccctttccaccatcagccgtgcgcagatggaacagcagttttccgccaactttttcggcgcacaccagctcaccatgcgcctgttacccgcgatgttaccgcacggtgaagggcgtattgtgatgacatcatcggtgatgggattaatctccacgccgggtcgtggcgcttacgcggccagtaaatatgcgctggaggcgtggtcagatgcactgcgcatggagctgcgccacagcggaattaaagtcagcctgatcgaacccggtcccattcgtactcgcttcaccgacaacgtcaaccagacgcaaagtgataaaccagtcgaaaatcccggcatcgccgcccgctttacgttgggaccggaagcggtggtggacaaagtacgccatgcttttattagcgagaagccgaagatgcgctatccggtgacgctggtgacctgggcggtaatggtgcttaagcgcctgctgccggggcgcgtgatggacaaaatattgcaggggtga

SEQ ID NO: 13 - protein, 362 aa, Escherichia coli
MPHNPIRVVVGPANYFSHPGSFNHLHDFFTDEQLSRAVWIYGKRAIAAAQTKLPPAFGLPGAKHILFRGHCSESDVQQLAAESGDDRSVVIGVGGGALLDTAKALARRLGLPFVAVPTIAATCAAWTPLSVWYNDAGQALHYEIFDDANFMVLVEPEIILNAPQQYLLAGIGDTLAKWYEAVVLAPQPETLPLTVRLGINNAQAIRDVLLNSSEQALSDQQNQQLTQSFCDVVDAIIAGGGMVGGLGDRFTRVAAAHAVHNGLTVLPQTEKFLHGTKVAYGILVQSALLGQDDVLAQLTGAYQRFHLPTTLAELEVDINNQAEIDKVIAHTLRPVESIHYLPVTLTPDTLRAAFKKVESFKA

SEQ ID NO: 14 - DNA, 1089 bp, Escherichia coli
atgcctcacaatcctatccgcgtggtcgtcggcccggctaactacttttcacatccaggaagtttcaatcacctgcacgattttttcactgatgaacaactttctcgcgcggtgtggatctacggcaaacgcgccattgctgcggcgcaaaccaaacttccgccagcgtttggactgccaggggcaaagcatattttgtttcgcggtcattgcagcgaaagcgatgtacaacaactggcggctgagtccggtgacgaccgcagcgtggtgattggcgtcggtggcggtgcactgctcgacaccgcgaaagccctcgcccgccgtctcggtctgccgtttgttgccgttccgacgatcgccgccacctgcgccgcctggacaccgctctccgtctggtataatgatgccggacaggcgctgcattatgagattttcgacgacgccaattttatggtgctggtggaaccggagattatcctcaatgcaccgcaacaatatctgctggcggggatcggtgacacgctggcgaaatggtatgaagcggtggtgctggctccgcaaccagaaacgttgccgctaaccgtgcgactggggatcaataatgcgcaagccattcgcgacgtcttgttaaacagtagcgaacaggcgctgagcgatcagcaaaatcaacagttaacgcaatcattttgcgatgtggtggatgctattattgctggtggtgggatggttggtggtctgggcgatcgttttacgcgtgtggcggcagctcatgccgtgcataacggtctgaccgtgctgccgcaaaccgagaagtttctccacggcaccaaagtcgcctacggaattctggtgcaaagcgccttgctgggtcaggatgatgtgctggcgcaattaactggagcgtatcagcgttttcatctgccgactacactggcggagctggaagtggatatcaataatcaggcggagatcgacaaagtgattgcccacaccctgcgtccggtggagtccattcattacctgccagtcacgctgacaccagatacgttgcgtgcagcgttcaaaaaagtggaatcgtttaaagcctga

SEQ ID NO: 15 - protein, 412 aa, Escherichia coli
MKALTYHGPHHVQVENVPDPGVEQADDIILRITATAICGSDLHLYRGKIPQVKHGDIFGHEFMGEVVETGKDVKNLQKGDRVVIPFVIACGDCFFCRLQQYAACENTNAGKGAALNKKQIPAPAALFGYSHLYGGVPGGQAEYVRVPKGNVGPFKVPPLLSDDKALFLSDILPTAWQAAKNAQIQQGSSVAVYGAGPVGLLTIACARLLGAEQIFVVDHHPYRLHFAADRYGAIPINFDEDSDPAQSIIEQTAGHRGVDAVIDAVGFEAKGSTTETVLTNLKLEGSSGKALRQCIAAVRRGGIVSVPGVYAGFIHGFLFGDAFDKGLSFKMGQTHVHAWLGELLPLIEKGLLKPEEIVTHYMPFEEAARGYEIFEKREEECRKVILVPGAQSAEAAQKAVSGLVNAMPGGTI

SEQ ID NO: 16 - DNA, 1239 bp, Escherichia coli
atgaaagcattgacttatcacggcccacatcacgttcaggtagaaaatgttcccgatccgggcgttgaacaggcagatgatattattctgcgtattacggcaacggcgatctgtggctctgacctccatctttatcgaggcaaaatacctcaggttaaacatggcgatatttttggtcatgaatttatgggggaagtagttgaaaccggaaaggacgtaaaaaatttgcaaaaaggcgaccgagtggtaattccgttcgtcattgcttgtggcgactgttttttctgtcgattgcaacaatatgccgcctgcgaaaataccaatgcgggtaaaggcgctgcgctcaataaaaaacagataccagctccagcggcattgtttggttatagtcacctgtatggcggcgttcctggtgggcaggcggaatatgtccgcgtccctaaagggaatgtggggccgtttaaagtaccgcctttgctttcagatgataaagcgcttttcctttctgatattctgccaacggcatggcaggcagcaaaaaatgcgcagatccaacaaggttcaagcgttgcagtctatggtgctggtcctgtgggattgttgacaatcgcctgtgcacggttgctcggtgcggaacagatttttgttgttgatcatcatccctaccgcttgcatttcgccgccgaccgctacggcgcgatcccgattaattttgatgaagacagcgatccggcacagtcaattattgaacaaacggcaggtcaccggggcgtggatgcagtaatagacgccgtcggttttgaagcgaaaggcagcaccacggaaacggtgctgactaacctgaaactggagggcagcagcggtaaagcgttgcgtcagtgtattgcggcggtcaggcgtggcggcattgttagcgtaccgggcgtctacgctggatttattcacggtttcctgtttggcgacgcctttgataaagggttgtcgtttaaaatgggacagacccacgttcacgcatggctgggagaattattaccgttaattgagaaaggattactgaaaccagaagaaattgttacccactatatgccgtttgaagaggccgcccggggatatgagattttcgaaaaacgtgaagaggagtgccgtaaggtgattctggtacccggtgcacaaagcgcagaggcggcgcagaaggcggtttcaggtctggtgaatgcgatgccggggggaacaatatga

SEQ ID NO: 17 - protein, 247 aa, Escherichia coli
MAIALVTGGSRGIGRATALLLAQEGYTVAVNYQQNLHAAQEVMNLITQAGGKAFVLQADISDENQVVAMFTAIDQHDEPLAALVNNAGILFTQCTVENLTAERINRVLSTNVTGYFLCCREAVKRMALKNGGSGGAIVNVSSVASRLGSPGEYVDYAASKGAIDTLTTGLSLEVAAQGIRVNCVRPGFIYTEMHASGGEPGRVDRVKSNIPMQRGGQAEEVAQAIVWLLSDKASYVTGSFIDLAGGK

SEQ ID NO: 18 - DNA, 744 bp, Escherichia coli
atggctatagcacttgtgactggtggcagtcgcggcatcgggcgggcaactgcattactgttggcgcaagaagggtatacggtggcggttaattatcagcaaaacctccacgcggcgcaggaagtgatgaacttaataacgcaagccggtggcaaagcattcgtgctccaggcggatatcagcgacgaaaaccaggtcgttgcgatgtttacagcaatcgatcagcacgatgaaccgctagcagcgctggtcaataacgccgggatcttgtttacccagtgcaccgttgaaaaccttaccgcagagcgaatcaaccgagtactttccaccaacgtgacgggatattttctctgctgccgcgaggcggtaaaacgcatggcgcttaaaaatggtggcagtggcggcgctatcgtcaatgtctcttcggtggcctcacggttgggttcgccaggggaatatgttgattacgcggcatcgaaaggggcgattgatacgttaaccaccggactatcgctggaagtcgccgcgcaggggatccgcgttaactgcgtgcggccagggtttatttataccgaaatgcacgccagcggcggcgagcctggacgcgtcgatcgcgttaagtcgaacatccccatgcagcgtggtggacaggcagaagaggtcgcgcaggccattgtctggctactaagtgataaagcctcttacgtcacgggaagttttatcgatttggcgggcgggaaataa

SEQ ID NO: 19 - protein, 324 aa, Escherichia coli
MQALLLEQQDGKTLASVQTLDESRLPEGDVTVDVHWSSLNYKDALAITGKGKIIRNFPMIPGIDFAGTVRTSEDPRFHAGQEVLLTGWGVGENHWGGLAEQARVKGDWLVAMPQGLDARKAMIIGTAGFTAMLCVMALEDAGVRPQDGEIVVTGASGGVGSTAVALLHKLGYQVVAVSGRESTHEYLKSLGASRVLPRDEFAESRPLEKQVWAGAIDTVGDKVLAKVLAQMNYGGCVAACGLAGGFTLPTTVMPFILRNVRLQGVDSVMTPPERRAQAWQRLVADLPESFYTQAAKEISLSEAPNFAEAIINNQIQGRTLVKVN

SEQ ID NO: 20 - DNA, 975 bp, Escherichia coli
atgcaggcgttacttttagaacagcaggacggcaaaactctcgcatcagtacagactctggacgaaagtcgcctgccggagggcgatgtcacggtcgatgttcactggtcgagcctgaactataaagatgcgctggcgattaccggtaagggaaaaatcatccgtaattttccgatgattcctgggatcgattttgccggaactgtacgcaccagcgaagatccgcgttttcatgccggtcaggaggtgttactcactggctggggcgttggtgaaaaccactggggtgggctggcggagcaggcgcgagtgaaaggtgactggctggttgccatgccgcaagggctggacgcgcgtaaagcaatgattatcggtactgccggttttaccgccatgctgtgtgtgatggcgctggaagatgccggtgttcgcccgcaggacggggagattgtcgtgacgggtgccagtggtggcgtcggcagtaccgccgtggcgctgctgcataagttgggttatcaggtcgttgccgtttccggtcgcgaaagtacccatgaatatctgaaaagtttaggtgctagccgtgttctccctcgtgatgagtttgccgaatcccgtcctctggaaaaacaagtctgggctggggcaattgacaccgttggcgacaaagtgctggcaaaagtgctggcgcaaatgaattacggcggctgcgtggcggcctgtggtctggcgggtggttttactctgccaaccacggtcatgccatttattctgcgtaatgtccgtttgcaaggggtggattcagtaatgacgccaccagaacgccgcgcacaagcctggcagcgactggtcgccgatttaccggaatcattctatacccaggcggcaaaagagatatctctgtcagaggcaccgaactttgccgaggccatcattaataaccagatccagggtcgcacgctggtgaaggttaactaa

SEQ ID NO: 21 - protein, 339 aa, Escherichia coli
MSMIKSYAAKEAGGELEVYEYDPGELRPQDVEVQVDYCGICHSDLSMIDNEWGFSQYPLVAGHEVIGRVVALGSAAQDKGLQVGQRVGIGWTARSCGHCDACISGNQINCEQGAVPTIMNRGGFAEKLRADWQWVIPLPENIDIESAGPLLCGGITVFKPLLMHHITATSRVGVIGIGGLGHIAIKLLHAMGCEVTAFSSNPAKEQEVLAMGADKVVNSRDPQALKALAGQFDLIINTVNVSLDWQPYFEALTYGGNFHTVGAVLTPLSVPAFTLIAGDRSVSGSATGTPYELRKLMRFAARSKVAPTTELFPMSKINDAIQHVRDGKARYRVVLKADF

SEQ ID NO: 22 - DNA, 1020 bp, Escherichia coli
atgtcgatgataaaaagctatgccgcaaaagaagcgggcggcgaactggaagtttatgagtacgatcccggtgagctgaggccacaagatgttgaagtgcaggtggattactgcgggatctgccattccgatctgtcgatgatcgataacgaatggggattttcacaatatccgctggttgccgggcatgaggtgattgggcgcgtggtggcactcgggagcgccgcgcaggataaaggtttgcaggtcggtcagcgtgtcgggattggctggacggcgcgtagctgtggtcactgcgacgcctgtattagcggtaatcagatcaactgcgagcaaggtgcggtgccgacgattatgaatcgcggtggctttgccgagaagttgcgtgcggactggcaatgggtgattccactgccagaaaatattgatatcgagtccgccgggccgctgttgtgcggcggtatcacggtctttaaaccactgttgatgcaccatatcactgctaccagccgcgttggggtaattggtattggcgggctggggcatatcgctataaaacttctgcacgcaatgggatgcgaggtgacagcctttagttctaatccggcgaaagagcaggaagtgctggcgatgggtgccgataaagtggtgaatagccgcgatccgcaggcactgaaagcactggcggggcagtttgatctcattatcaacaccgtcaacgtcagcctcgactggcagccctattttgaggcgctgacctatggcggtaatttccatacggtcggtgcggttctcacgccgctgtctgttccggcctttacgttaattgcgggcgatcgcagcgtctctggttctgctaccggcacgccttatgagctgcgtaagctgatgcgttttgccgcccgcagcaaggttgcgccgaccaccgaactgttcccgatgtcgaaaattaacgacgccatccagcatgtgcgcgacggtaaggcgcgttaccgcgtggtgttgaaagccgatttttga

SEQ ID NO: 23 - protein, 362 aa, Escherichia coli
MERIVVTLGERSYPITIASGLFNEPASFLPLKSGEQVMLVTNETLAPLYLDKVRGVLEQAGVNVDSVILPDGEQYKSLAVLDTVFTALLQKPHGRDTTLVALGGGVVGDLTGFAAASYQRGVRFIQVPTTLLSQVDSSVGGKTAVNHPLGKNMIGAFYQPASVVVDLDCLKTLPPRELASGLAEVIKYGIILDGAFFNWLEENLDALLRLDGPAMAYCIRRCCELKAEVVAADERETGLRALLNLGHTFGHAIEAEMGYGNWLHGEAVAAGMVMAARTSERLGQFSSAETQRIITLLKRAGLPVNGPREMSAQAYLPHMLRDKKVLAGEMRLILPLAIGKSEVRSGVSHELVLNAIADCQSA

SEQ ID NO: 24 - DNA, 1089 bp, Escherichia coli
atggagaggattgtcgttactctcggggaacgtagttacccaattaccatcgcatctggtttgtttaatgaaccagcttcattcttaccgctgaaatcgggcgagcaggtcatgttggtcaccaacgaaaccctggctcctctgtatctcgataaggtccgcggcgtacttgaacaggcgggtgttaacgtcgatagcgttatcctccctgacggcgagcagtataaaagcctggctgtactcgataccgtctttacggcgttgttacaaaaaccgcatggtcgcgatactacgctggtggcgcttggcggcggcgtagtgggcgatctgaccggcttcgcggcggcgagttatcagcgcggtgtccgtttcattcaagtcccgacgacgttactgtcgcaggtcgattcctccgttggcggcaaaactgcggtcaaccatcccctcggtaaaaacatgattggcgcgttctaccaacctgcttcagtggtggtggatctcgactgtctgaaaacgcttcccccgcgtgagttagcgtcggggctggcagaagtcatcaaatacggcattattcttgacggtgcgttttttaactggctggaagagaatctggatgcgttgttgcgtctggacggtccggcaatggcgtactgtattcgccgttgttgtgaactgaaggcagaagttgtcgccgccgacgagcgcgaaaccgggttacgtgctttactgaatctgggacacacctttggtcatgccattgaagctgaaatggggtatggcaattggttacatggtgaagcggtcgctgcgggtatggtgatggcggcgcggacgtcggaacgtctcgggcagtttagttctgccgaaacgcagcgtattataaccctgctcaagcgggctgggttaccggtcaatgggccgcgcgaaatgtccgcgcaggcgtatttaccgcatatgctgcgtgacaagaaagtccttgcgggagagatgcgcttaattcttccgttggcaattggtaagagtgaagttcgcagcggcgtttcgcacgagcttgttcttaacgccattgccgattgtcaatcagcgtaa

SEQ ID NO: 25 - protein, 350 aa, Escherichia coli
MKKLVATAPRVAALVEYEDRAILANEVKIRVRFGAPKHGTEVVDFRAASPFIDEDFNGEWQMFTPRPADAPRGIEFGKFQLGNMVVGDIIECGSDVTDYAVGDSVCGYGPLSETVIINAVNNYKLRKMPQGSSWKNAVCYDPAQFAMSGVRDANVRVGDFVVVVGLGAIGQIAIQLAKRAGASVVIGVDPIAHRCDIARRHGADFCLNPIGTDVGKEIKTLTGKQGADVIIETSGYADALQSALRGLAYGGTISYVAFAKPFAEGFNLGREAHFNNAKIVFSRACSEPNPDYPRWSRKRIEETCWELLMNGYLNCEDLIDPVVTFANSPESYMQYVDQHPEQSIKMGVTF

SEQ ID NO: 26 - DNA, 1053 bp, Escherichia coli
atgaaaaagttagtagccacagcaccgcgtgttgctgcgctggttgagtatgaagatcgggcgattttagctaatgaagtgaagatccgcgtgcgtttcggcgcaccgaaacacggaacggaagtggtcgacttccgcgccgccagcccgtttattgatgaagactttaacggcgaatggcagatgttcactccgcgtccggcagatgcgccgcgcggcattgagtttggcaaattccagcttggcaacatggtggttggcgacattatcgagtgcggcagcgacgttaccgactacgcggtgggcgacagcgtatgcggctacggcccgctctccgagacggtcatcattaacgcagtgaataactacaagctgcgcaaaatgccgcaaggcagctcctggaaaaacgccgtctgctacgacccggcgcagtttgccatgagcggcgtgcgcgatgccaacgtgcgcgtaggggattttgtggtggtggtagggcttggcgcaatcggtcaaattgccatccaactggctaaacgcgctggcgcttctgtggtgattggcgtcgatcctatcgcccatcgctgtgatattgcccgtcgccacggcgcggatttctgccttaaccccatcggcactgatgtaggtaaagagatcaaaacgctgaccggcaagcagggtgccgatgtgattatcgaaaccagcggctacgccgacgcgctgcaatcggcgctccgcggtctggcttatggcggcaccatctcctatgtcgcgtttgccaagccgtttgccgaaggttttaacctcggacgcgaagcgcatttcaataacgccaaaattgtcttctctcgcgcgtgcagcgaaccgaacccggattatccgcgctggagccgcaagcgtattgaagaaacctgttgggaactgctgatgaacggttatctcaattgcgaagatttaatcgacccggtggtgacctttgccaatagcccggaaagctatatgcagtatgtcgaccagcatccggaacagagcatcaaaatgggcgttacgttttaa

SEQ ID NO: 27 - protein, 286 aa, Escherichia coli
MSSNTFTLGTKSVNRLGYGAMQLAGPGVFGPPRDRHVAITVLREALALGVNHIDTSDFYGPHVTNQIIREALYPYSDDLTIVTKIGARRGEDASWLPAFSPAELQKAVHDNLRNLGLDVLDVVNLRVMMGDGHGPAEGSIEASLTVLAEMQQQGLVKHIGLSNVTPTQVAEARKIAEIVCVQNEYNIAHRADDAMIDALAHDGIAYVPFFPLGGFTPLQSSTLSDVAASLGATPMQVALAWLLQRSPNILLIPGTSSVAHLRENMAAEKLHLSEEVLSTLDGISRE

SEQ ID NO: 28 - DNA, 861 bp, Escherichia coli
atgagcagcaatacatttactctcggtacaaaatccgttaaccgtcttggttatggcgcgatgcaactggcaggtcctggagtttttggccccccacgagatcgccacgtcgctataaccgtgctgcgtgaggcgctggcattgggcgtcaatcatattgataccagcgacttttatggtccgcacgtcaccaatcagattatccgcgaagcgctttatccttactctgacgacctgacaattgtcactaaaattggtgcgcggcgtggagaggacgcatcctggttgcccgcattttctccggcagagctgcaaaaagcggtgcacgataatctacgtaatctcgggctggacgtgctggatgtggttaacctgcgcgttatgatgggggatggtcatggcccagcggaaggatcgattgaggccagcctgaccgtgctggcagagatgcaacaacaaggcctggtaaaacatattggcctgagcaacgtcacaccgacgcaggttgcagaggcgcgcaagattgccgaaattgtctgtgtgcaaaacgaatacaacatcgcgcaccgtgctgatgatgcaatgattgatgctttggcccacgatggcattgcctacgtgccgttcttcccgctcgggggctttacaccgctgcaatcgtccacactttccgatgttgctgcgagcctgggtgcaacaccaatgcaggtggcgctggcgtggctgttacagcgttcaccgaatattttgctgatcccagggacgtcttcggttgcgcatttacgggagaatatggctgctgaaaaattgcatctttctgaggaagtgttgtctacgttggatggtatttcgcgagaataa

SEQ ID NO: 29 - protein, 326 aa, Escherichia coli
MKKIPLGTTDITLSRMGLGTWAIGGGPAWNGDLDRQICIDTILEAHRCGINLIDTAPGYNFGNSEVIVGQALKKLPREQVVVETKCGIVWERKGSLFNKVGDRQLYKNLSPESIREEVAASLQRLGIDYIDIYMTHWQSVPPFFTPIAETVAVLNELKSEGKIRAIGAANVDADHIREYLQYGELDIIQAKYSILDRAMENELLPLCRDNGIVVQVYSPLEQGLLTGTITRDYVPGGARANKVWFQRENMLKVIDMLEQWQPLCARYQCTIPTLALAWILKQSDLISILSGATAPEQVRENVAALNINLSDADATLMREMAEALER

SEQ ID NO: 30 - DNA, 981 bp, Escherichia coli
atgaaaaagatacctttaggcacaacggatattacgctttcgcgaatggggttggggacatgggccattggcggcggtcctgcatggaatggcgatctcgatcggcaaatatgtattgatacgattcttgaagcccatcgttgtggcattaatctgattgatactgcgccaggatataactttggcaatagtgaagttatcgtcggtcaggcgttaaaaaaactgccccgtgaacaggttgtagtagaaaccaaatgcggcattgtctgggaacgaaaaggaagtttattcaacaaagttggcgatcggcagttgtataaaaacctttccccggaatctatccgcgaagaggtagcagcgagcttgcaacgtctgggtattgattacatcgatatctacatgacgcactggcagtcggtgccgccattttttacgccgatcgctgaaactgtcgcagtgcttaatgagttaaagtctgaagggaaaattcgcgctataggcgctgctaacgtcgatgctgaccatatccgcgagtatctgcaatatggtgaactggatattattcaggcgaaatacagtatcctcgaccgggcaatggaaaacgaactgctgccactatgtcgtgataatggcattgtggttcaggtttattccccgctagagcagggattgttgaccggcaccatcactcgtgattacgttccgggcggcgctcgggcaaataaagtctggttccagcgtgaaaacatgctgaaagtgattgatatgcttgaacagtggcagccactttgtgctcgttatcagtgcacaattcccactctggcactggcgtggatattaaaacagagtgatttaatctccattcttagtggggctactgcaccggaacaggtacgcgaaaatgtcgcggcactgaatatcaacttatcggatgcagacgcaacattgatgagggaaatggcagaggccctggagcgttaa

SEQ ID NO: 31 - protein, 284 aa, Escherichia coli
MQQKMIQFSGDVSLPAVGQGTWYMGEDASQRKTEVAALRAGIELGLTLIDTAEMYADGGAEKVVGEALTGLREKVFLVSKVYPWNAGGQKAINACEASLRRLNTDYLDLYLLHWSGSFAFEETVAAMEKLIAQGKIRRWGVSNLDYADMQELWQLPGGNQCATNQVLYHLGSRGIEYDLLPWCQQQQMPVMAYSPLAQAGRLRNGLLKNAVVNEIAHAHNISAAQVLLAWVISHQGVMAIPKAATIAHVQQNAAVLEVELSSAELAMLDKAYPAPKGKTALDMV

SEQ ID NO: 32 - DNA, 855 bp, Escherichia coli
atgcaacaaaaaatgattcaatttagtggcgatgtctcactgccagccgtagggcagggaacatggtatatgggcgaagatgccagtcagcgcaaaacagaagttgctgcactacgcgcgggcattgaactcggtttaaccctcattgataccgccgaaatgtatgccgatggcggtgccgaaaaggtggttggggaagcattaaccggtctgcgagagaaggtctttctcgtctctaaagtctatccgtggaatgctggcgggcaaaaagcgataaatgcatgcgaagccagtttacgccgtctcaatactgattatctcgatctttacttattacactggtctggcagtttcgcttttgaagagactgtcgcagcgatggaaaaattgatcgcccagggaaaaatccgccgctggggcgtttctaaccttgattatgctgatatgcaggaactctggcagctgccggggggaaatcagtgtgccactaatcaggtgctttaccatctcggttcacgaggaattgagtacgatctactcccctggtgccagcaacagcagatgccggtgatggcttacagtccgttagcccaggccgggcggttgcgcaatggactgttaaaaaacgcggtagtcaacgaaattgcacatgctcacaatatcagcgcggcacaagtattgttggcgtgggtgatcagtcatcagggtgtgatggcgattccaaaagcggccacgattgcccatgtccaacaaaatgcggctgtgcttgaggtcgaactttcttcagcggaattagctatgctggataaggcatatccggcaccaaaaggaaaaactgcgctggatatggtgtga

SEQ ID NO: 33 - protein, 345 aa, Escherichia coli
MGQQKQRNRRWVLASRPHGAPVPENFRLEEDDVATPGEGQVLLRTVYLSLDPYMRGRMSDEPSYSPPVDIGGVMVGGTVSRVVESNHPDYQSGDWVLGYSGWQDYDISSGDDLVKLGDHPQNPSWSLGVLGMPGFTAYMGLLDIGQPKEGETLVVAAATGPVGATVGQIGKLKGCRVVGVAGGAEKCRHATEVLGFDVCLDHHADDFAEQLAKACPKGIDIYYENVGGKVFDAVLPLLNTSARIPVCGLVSSYNATELPPGPDRLPLLMATVLKKRIRLQGFIIAQDYGHRIHEFQREMGQWVKEDKIHYREEITDGLENAPQTFIGLLKGKNFGKVVIRVAGDD

SEQ ID NO: 34 - DNA, 1038 bp, Escherichia coli
atggggcaacaaaagcagcgtaatcgacgttgggttctggcctcgcgtccacatggcgcacctgttccggagaatttccgtcttgaagaagatgatgtcgccacaccgggtgaaggacaggtgttactgcgcacagtttatttgtccctggacccgtatatgcgtggacgtatgagcgatgagccatcttattcaccgcctgttgatattggcggcgtgatggtcggcggtacggtgagccgtgtcgtggagtcgaatcatcctgattatcagtctggcgactgggtgctgggctacagtggatggcaagactatgacatatccagtggtgatgatctggtgaaacttggcgatcatccgcaaaatccatcgtggtcgctgggtgtgctagggatgccaggctttaccgcttatatgggcctactggatatcggtcagcctaaagagggcgaaacgttggtggtagctgcggcgacaggaccagtgggggcgacggtggggcaaatcggcaaacttaaaggttgcagagtggtgggggtagccggtggcgcggaaaaatgccgccatgctaccgaggtgttaggcttcgatgtttgtcttgatcaccacgcggatgattttgccgaacaactggcgaaagcgtgcccaaaaggtattgatatctattatgaaaacgtgggcggtaaggtattcgatgcggtgctaccgttacttaatacatctgcgcgcattcccgtctgcggattagtgagcagctataacgctacagagctaccacccggtccggatcgtttacctctgttgatggctacagtgctgaaaaaacgtattcgcttgcaaggttttattatcgctcaggattatggtcaccgcatccatgagtttcagagggagatggggcaatgggtgaaagaggataaaatccactaccgcgaagaaattactgacggtttagagaatgcgccacagacgtttatcggcctgctgaagggtaaaaacttcggcaaagtggtgatccgcgtggcgggtgatgattaa

SEQ ID NO: 35 - protein, 387 aa, Escherichia coli
MNNFNLHTPTRILFGKGAIAGLREQIPHDARVLITYGGGSVKKTGVLDQVLDALKGMDVLEFGGIEPNPAYETLMNAVKLVREQKVTFLLAVGGGSVLDGTKFIAAAANYPENIDPWHILQTGGKEIKSAIPMGCVLTLPATGSESNAGAVISRKTTGDKQAFHSAHVQPVFAVLDPVYTYTLPPRQVANGVVDAFVHTVEQYVTKPVDAKIQDRFAEGILLTLIEDGPKALKEPENYDVRANVMWAATQALNGLIGAGVPQDWATHMLGHELTAMHGLDHAQTLAIVLPALWNEKRDTKRAKLLQYAERVWNITEGSDDERIDAAIAATRNFFEQLGVPTHLSDYGLDGSSIPALLKKLEEHGMTQLGENHDITLDVSRRIYEAAR

SEQ ID NO: 36 - DNA, 1164 bp, Escherichia coli
atgaacaactttaatctgcacaccccaacccgcattctgtttggtaaaggcgcaatcgctggtttacgcgaacaaattcctcacgatgctcgcgtattgattacctacggcggcggcagcgtgaaaaaaaccggcgttctcgatcaagttctggatgccctgaaaggcatggacgtgctggaatttggcggtattgagccaaacccggcttatgaaacgctgatgaacgccgtgaaactggttcgcgaacagaaagtgactttcctgctggcggttggcggcggttctgtactggacggcaccaaatttatcgccgcagcggctaactatccggaaaatatcgatccgtggcacattctgcaaacgggcggtaaagagattaaaagcgccatcccgatgggctgtgtgctgacgctgccagcaaccggttcagaatccaacgcaggcgcggtgatctcccgtaaaaccacaggcgacaagcaggcgttccattctgcccatgttcagccggtatttgccgtgctcgatccggtttatacctacaccctgccgccgcgtcaggtggctaacggcgtagtggacgcctttgtacacaccgtggaacagtatgttaccaaaccggttgatgccaaaattcaggaccgtttcgcagaaggcattttgctgacgctaatcgaagatggtccgaaagccctgaaagagccagaaaactacgatgtgcgcgccaacgtcatgtgggcggcgactcaggcgctgaacggtttgattggcgctggcgtaccgcaggactgggcaacgcatatgctgggccacgaactgactgcgatgcacggtctggatcacgcgcaaacactggctatcgtcctgcctgcactgtggaatgaaaaacgcgataccaagcgcgctaagctgctgcaatatgctgaacgcgtctggaacatcactgaaggttccgatgatgagcgtattgacgccgcgattgccgcaacccgcaatttctttgagcaattaggcgtgccgacccacctctccgactacggtctggacggcagctccatcccggctttgctgaaaaaactggaagagcacggcatgacccaactgggcgaaaatcatgacattacgttggatgtcagccgccgtatatacgaagccgcccgctaa

SEQ ID NO: 37 - protein, 358 aa, Escherichia coli
MKALARFGKAFGGYKMIDVPQPMCGPEDVVIEIKAAAICGADMKHYNVDSGSDEFNSIRGHEFAGCIAQVGEKVKDWKVGQRVVSDNSGHVCGVCPACEQGDFLCCTEKVNLGLDNNTWGGGFSKYCLVPGEILKIHRHALWEIPDGVDYEDAAVLDPICNAYKSIAQQSKFLPGQDVVVIGTGPLGLFSVQMARIMGAVNIVVVGLQEDVAVRFPVAKELGATAVVNGSTEDVVARCQQICGKDNLGLVIECSGANIALKQAIEMLRPNGEVVRVGMGFKPLDFSINDITAWNKSIIGHMAYDSTSWRNAIRLLASGAIKVKPMITHRIGLSQWREGFDAMVDKTAIKVIMTYDFDE

SEQ ID NO: 38 - DNA, 1077 bp, Escherichia coli
atgaaagcactggctcggtttggcaaggcctttggcggctacaagatgattgatgtcccacaacccatgtgtggcccggaagatgtagtgattgaaattaaagccgcggcaatctgcggcgcagacatgaagcactacaatgtcgatagcggttctgatgagtttaactctatccgcggccatgagttcgcaggttgtattgcgcaggttggtgaaaaagtcaaagactggaaagtggggcaacgcgtcgtatcggataacagcggtcacgtttgcggtgtttgtccggcctgtgaacaaggtgattttctgtgttgtacagaaaaagtaaaccttggtctggataataatacctggggcggtggtttttccaaatattgtctggttcctggtgaaattctcaaaattcatcgtcatgcgttgtgggaaatccctgatggtgttgattatgaggacgcagccgtacttgaccctatctgtaatgcctacaaatccatcgcgcagcaatcgaaattccttcctggtcaggatgtggtcgtcatcggcactggcccactcgggctgttctccgtacaaatggcgcgaattatgggggcggtaaatatcgtcgtcgttggtctgcaagaagatgtggcggtccgcttcccggttgcaaaagaactgggtgcgacggcagtagtaaatggttctaccgaagatgtggtggcgcgctgccagcaaatttgtggcaaagacaatctgggactggtgattgaatgctccggtgccaatatcgcactgaaacaagccatcgaaatgctccgcccgaacggggaagtggtacgcgttggaatgggcttcaaacctcttgatttctcgattaatgacattaccgcctggaacaaaagcatcattgggcatatggcctatgactccacctcatggcgtaacgctatcaggctattagccagcggcgctatcaaagtcaaaccgatgatcacgcatcgtatcggcctgtcgcaatggcgcgaagggtttgatgcgatggtcgataaaaccgcaatcaaagtgatcatgacttacgactttgatgaataa

SEQ ID NO: 39 - protein, 346 aa, Escherichia coli
MQYHRIPHSSLEVSTLGLGTMTFGEQNSEADAHAQLDYAVAQGINLIDVAEMYPVPPRPETQGLTETYVGNWLAKHGSREKLIIASKVSGPSRNNDKGIRPDQALDRKNIREALHDSLKRLQTDYLDLYQVHWPQRPTNCFGKLGYSWTDSAPAVSLLDTLDALAEYQRAGKIRYIGVSNETAFGVMRYLHLADKHDLPRIVTIQNPYSLLNRSFEVGLAEVSQYEGVELLAYSCLGFGTLTGKYLNGAKPAGARNTLFSRFTRYSGEQTQKAVAAYVDIARRHGLDPAQMALAFVRRQPFVASTLLGATTMDQLKTNIESLHLELSEDVLAEIEAVHQVYTYPAP

SEQ ID NO: 40 - DNA, 1041 bp, Escherichia coli
atgcaatatcaccgtataccccacagttcgctggaagtcagcacgctggggcttggcacgatgacgtttggtgaacagaacagcgaagccgacgcccacgcacaactcgactatgccgtcgctcagggcattaaccttatcgacgttgccgaaatgtacccagtacctccgcgccccgaaacgcaagggttaaccgaaacctacgtcggcaactggctggcgaaacatggcagccgcgaaaagttaattatcgcctccaaagtgagcggaccgtcgcgcaataatgacaagggcatccgcccggatcaggcgctggatcggaagaatatccgcgaagcgctgcatgacagcctcaagcgcctacagactgattacctcgatctttatcaggtgcactggccgcagcgcccgaccaactgcttcggcaaactcggttatagctggacggattctgcgcctgcggtttcgctgctggatacgctggacgcactggcagagtaccaacgcgcgggaaaaattcgttatatcggcgtgtcgaacgaaactgcatttggcgtaatgcgctacctgcatctggcggacaaacacgatctgccgcgtattgtcaccattcagaacccttacagtctgttaaaccgcagttttgaagtaggtctggcagaagtcagccagtatgaaggggtcgaactgctggcctattcgtgcctgggtttcggcacgctgaccgggaaatatctcaatggtgcaaaacccgctggcgcacgtaatacgctctttagtcggttcacccgctatagcggtgagcaaacgcaaaaagccgtcgcggcgtatgttgatatcgccagacgtcatggcctggaccctgctcagatggcgctcgcgtttgtacgccgtcaaccgtttgttgccagcactctgctgggcgcaaccacgatggatcagctgaaaactaacatcgaaagtttgcatctggagttaagcgaagacgtattagctgaaattgaagcggtgcatcaggtttatacttatccggcaccataa

SEQ ID NO: 41 - protein, 1174 aa, Nocardia sp. NRRL 5646
MAVDSPDERLQRRIAQLFAEDEQVKAARPLEAVSAAVSAPGMRLAQIAATVMAGYADRPAAGQRAFELNTDDATGRTSLRLLPRFETITYRELWQRVGEVAAAWHHDPENPLRAGDFVALLGFTSIDYATLDLADIHLGAVTVPLQASAAVSQLIAILTETSPRLLASTPEHLDAAVECLLAGTTPERLVVFDYHPEDDDQRAAFESARRRLADAGSLVIVETLDAVRARGRDLPAAPLFVPDTDDDPLALLIYTSGSTGTPKGAMYTNRLAATMWQGNSMLQGNSQRVGINLNYMPMSHIAGRISLFGVLARGGTAYFAAKSDMSTLFEDIGLVRPTEIFFVPRVCDMVFQRYQSELDRRSVAGADLDTLDREVKADLRQNYLGGRFLVAVVGSAPLAAEMKTFMESVLDLPLHDGYGSTEAGASVLLDNQIQRPPVLDYKLVDVPELGYFRTDRPHPRGELLLKAETTIPGYYKRPEVTAEIFDEDGFYKTGDIVAELEHDRLVYVDRRNNVLKLSQGEFVTVAHLEAVFASSPLIRQIFIYGSSERSYLLAVIVPTDDALRGRDTATLKSALAESIQRIAKDANLQPYEIPRDFLIETEPFTIANGLLSGIAKLLRPNLKERYGAQLEQMYTDLATGQADELLALRREAADLPVLETVSRAAKAMLGVASADMRPDAHFTDLGGDSLSALSFSNLLHEIFGVEVPVGVVVSPANELRDLANYIEAERNSGAKRPTFTSVHGGGSEIRAADLTLDKFIDARTLAAADSIPHAPVPAQTVLLTGANGYLGRFLCLEWLERLDKTGGTLICVVRGSDAAAARKRLDSAFDSGDPGLLEHYQQLAARTLEVLAGDIGDPNLGLDDATWQRLAETVDLIVHPAALVNHVLPYTQLFGPNVVGTAEIVRLAITARRKPVTYLSTVGVADQVDPAEYQEDSDVREMSAVRVVRESYANGYGNSKWAGEVLLREAHDLCGLPVAVFRSDMILAHSRYAGQLNVQDVFTRLILSLVATGIAPYSFYRTDADGNRQRAHYDGLPADFTAAAITALGIQATEGFRTYDVLNPYDDGISLDEFVDWLVESGHPIQRITDYSDWFHRFETAIRALPEKQRQASVLPLLDAYRNPCPAVRGAILPAKEFQAAVQTAKIGPEQDIPHLSAPLIDKYVSDLELLQLL

SEQ ID NO: 42 - DNA, 3525 bp, Nocardia sp. NRRL 5646
atggcagtggattcaccggatgagcggctacagcgccgcattgcacagttgtttgcagaagatgagcaggtcaaggccgcacgtccgctcgaagcggtgagcgcggcggtgagcgcgcccggtatgcggctggcgcagatcgccgccactgttatggcgggttacgccgaccgcccggccgccgggcagcgtgcgttcgaactgaacaccgacgacgcgacgggccgcacctcgctgcggttacttccccgattcgagaccatcacctatcgcgaactgtggcagcgagtcggcgaggttgccgcggcctggcatcatgatcccgagaaccccttgcgcgcaggtgatttcgtcgccctgctcggcttcaccagcatcgactacgccaccctcgacctggccgatatccacctcggcgcggttaccgtgccgttgcaggccagcgcggcggtgtcccagctgatcgctatcctcaccgagacttcgccgcggctgctcgcctcgaccccggagcacctcgatgcggcggtcgagtgcctactcgcgggcaccacaccggaacgactggtggtcttcgactaccaccccgaggacgacgaccagcgtgcggccttcgaatccgcccgccgccgccttgccgacgcgggcagcttggtgatcgtcgaaacgctcgatgccgtgcgtgcccggggccgcgacttaccggccgcgccactgttcgttcccgacaccgacgacgacccgctggccctgctgatctacacctccggcagcaccggaacgccgaagggcgcgatgtacaccaatcggttggccgccacgatgtggcaggggaactcgatgctgcaggggaactcgcaacgggtcgggatcaatctcaactacatgccgatgagccacatcgccggtcgcatatcgctgttcggcgtgctcgctcgcggtggcaccgcatacttcgcggccaagagcgacatgtcgacactgttcgaagacatcggcttggtacgtcccaccgagatcttcttcgtcccgcgcgtgtgcgacatggtcttccagcgctatcagagcgagctggaccggcgctcggtggcgggcgccgacctggacacgctcgatcgggaagtgaaagccgacctccggcagaactacctcggtgggcgcttcctggtggcggtcgtcggcagcgcgccgctggccgcggagatgaagacgttcatggagtccgtcctcgatctgccactgcacgacgggtacgggtcgaccgaggcgggcgcaagcgtgctgctcgacaaccagatccagcggccgccggtgctcgattacaagctcgtcgacgtgcccgaactgggttacttccgcaccgaccggccgcatccgcgcggtgagctgttgttgaaggcggagaccacgattccgggctactacaagcggcccgaggtcaccgcggagatcttcgacgaggacggcttctacaagaccggcgatatcgtggccgagctcgagcacgatcggctggtctatgtcgaccgtcgcaacaatgtgctcaaactgtcgcagggcgagttcgtgaccgtcgcccatctcgaggccgtgttcgccagcagcccgctgatccggcagatcttcatctacggcagcagcgaacgttcctatctgctcgcggtgatcgtccccaccgacgacgcgctgcgcggccgcgacaccgccaccttgaaatcggcactggccgaatcgattcagcgcatcgccaaggacgcgaacctgcagccctacgagattccgcgcgatttcctgatcgagaccgagccgttcaccatcgccaacggactgctctccggcatcgcgaagctgctgcgccccaatctgaaggaacgctacggcgctcagctggagcagatgtacaccgatctcgcgacaggccaggccgatgagctgctcgccctgcgccgcgaagccgccgacctgccggtgctcgaaaccgtcagccgggcagcgaaagcgatgctcggcgtcgcctccgccgatatgcgtcccgacgcgcacttcaccgacctgggcggcgattccctttccgcgctgtcgttctcgaacctgctgcacgagatcttcggggtcgaggtgccggtgggtgtcgtcgtcagcccggcgaacgagctgcgcgatctggcgaattacattgaggcggaacgcaactcgggcgcgaagcgtcccaccttcacctcggtgcacggcggcggttccgagatccgcgccgccgatctgaccctcgacaagttcatcgatgcccgcaccctggccgccgccgacagcattccgcacgcgccggtgccagcgcagacggtgctgctgaccggcgcgaacggctacctcggccggttcctgtgcctggaatggctggagcggctggacaagacgggtggcacgctgatctgcgtcgtgcgcggtagtgacgcggccgcggcccgtaaacggctggactcggcgttcgacagcggcgatcccggcctgctcgagcactaccagcaactggccgcacggaccctggaagtcctcgccggtgatatcggcgacccgaatctcggtctggacgacgcgacttggcagcggttggccgaaaccgtcgacctgatcgtccatcccgccgcgttggtcaaccacgtccttccctacacccagctgttcggccccaatgtcgtcggcaccgccgaaatcgtccggttggcgatcacggcgcggcgcaagccggtcacctacctgtcgaccgtcggagtggccgaccaggtcgacccggcggagtatcaggaggacagcgacgtccgcgagatgagcgcggtgcgcgtcgtgcgcgagagttacgccaacggctacggcaacagcaagtgggcgggggaggtcctgctgcgcgaagcacacgatctgtgtggcttgccggtcgcggtgttccgttcggacatgatcctggcgcacagccggtacgcgggtcagctcaacgtccaggacgtgttcacccggctgatcctcagcctggtcgccaccggcatcgcgccgtactcgttctaccgaaccgacgcggacggcaaccggcagcgggcccactatgacggcttgccggcggacttcacggcggcggcgatcaccgcgctcggcatccaagccaccgaaggcttccggacctacgacgtgctcaatccgtacgacgatggcatctccctcgatgaattcgtcgactggctcgtcgaatccggccacccgatccagcgcatcaccgactacagcgactggttccaccgtttcgagacggcgatccgcgcgctgccggaaaagcaacgccaggcctcggtgctgccgttgctggacgcctaccgcaacccctgcccggcggtccgcggcgcgatactcccggccaaggagttccaagcggcggtgcaaacagccaaaatcggtccggaacaggacatcccgcatttgtccgcgccactgatcgataagtacgtcagcgatctggaactgcttcagctgctctga

SEQ ID NO: 43 - protein, 1168 aa, Mycobacterium tuberculosis
MSINDQRLTRRVEDLYASDAQFAAASPNEAITQAIDQPGVALPQLIRMVMEGYADRPALGQRALRFVTDPDSGRTMVELLPRFETITYRELWARAGTLATALSAEPAIRPGDRVCVLGFNSVDYTTIDIALIRLGAVSVPLQTSAPVTGLRPIVTETEPTMIATSIDNLGDAVEVLAGHAPARLVVFDYHGKVDTHREAVEAARARLAGSVTIDTLAELIERGRALPATPIADSADDALALLIYTSGSTGAPKGAMYRESQVMSFWRKSSGWFEPSGYPSITLNFMPMSHVGGRQVLYGTLSNGGTAYFVAKSDLSTLFEDLALVRPTELCFVPRIWDMVFAEFHSEVDRRLVDGADRAALEAQVKAELRENVLGGRFVMALTGSAPISAEMTAWVESLLADVHLVEGYGSTEAGMVLNDGMVRRPAVIDYKLVDVPELGYFGTDQPYPRGELLVKTQTMFPGYYQRPDVTAEVFDPDGFYRTGDIMAKVGPDQFVYLDRRNNVLKLSQGEFIAVSKLEAVFGDSPLVRQIFIYGNSARAYPLAVVVPSGDALSRHGIENLKPVISESLQEVARAAGLQSYEIPRDFIIETTPFTLENGLLTGIRKLARPQLKKFYGERLERLYTELADSQSNELRELRQSGPDAPVLPTLCRAAAALLGSTAADVRPDAHFADLGGDSLSALSLANLLHEIFGVDVPVGVIVSPASDLRALADHIEAARTGVRRPSFASIHGRSATEVHASDLTLDKFIDAATLAAAPNLPAPSAQVRTVLLTGATGFLGRYLALEWLDRMDLVNGKLICLVRARSDEEAQARLDATFDSGDPYLVRHYRELGAGRLEVLAGDKGEADLGLDRVTWQRLADTVDLIVDPAALVNHVLPYSQLFGPNAAGTAELLRLALTGKRKPYIYTSTIAVGEQIPPEAFTEDADIRAISPTRRIDDSYANGYANSKWAGEVLLREAHEQCGLPVTVFRCDMILADTSYTGQLNLPDMFTRLMLSLAATGIAPGSFYELDAHGNRQRAHYDGLPVEFVAEAICTLGTHSPDRFVTYHVMNPYDDGIGLDEFVDWLNSPTSGSGCTIQRIADYGEWLQRFETSLRALPDRQRHASLLPLLHNYREPAKPICGSIAPTDQFRAAVQEAKIGPDKDIPHLTAAIIAKYISNLRLLGLL

SEQ ID NO: 44 - DNA, 3507 bp, Mycobacterium tuberculosis
atgtcgatcaacgatcagcgactgacacgccgcgtcgaggacctatacgccagcgacgcccagttcgccgccgccagtcccaacgaggcgatcacccaggcgatcgaccagcccggggtcgcgcttccacagctcatccgtatggtcatggagggctacgccgatcggccggcactcggccagcgtgcgctccgcttcgtcaccgaccccgacagcggccgcaccatggtcgagctactgccgcggttcgagaccatcacctaccgcgaactgtgggcccgcgccggcacattggccaccgcgttgagcgctgagcccgcgatccggccgggcgaccgggtttgcgtgctgggcttcaacagcgtcgactacacaaccatcgacatcgcgctgatccggttgggcgccgtgtcggttccactgcagaccagtgcgccggtcaccgggttgcgcccgatcgtcaccgagaccgagccgacgatgatcgccaccagcatcgacaatcttggcgacgccgtcgaagtgctggccggtcacgccccggcccggctggtcgtattcgattaccacggcaaggttgacacccaccgcgaggccgtcgaagccgcccgagctcggttggccggctcggtgaccatcgacacacttgccgaactgatcgaacgcggcagggcgctgccggccacacccattgccgacagcgccgacgacgcgctggcgctgctgatttacacctcgggtagtaccggcgcacccaaaggcgccatgtatcgcgagagccaggtgatgagcttctggcgcaagtcgagtggctggttcgagccgagcggttacccctcgatcacgctgaacttcatgccgatgagccacgtcgggggccgtcaggtgctctacgggacgctttccaacggcggtaccgcctacttcgtcgccaagagcgacctgtcgacgctgttcgaggacctcgccctggtgcggcccacagaattgtgcttcgtgccgcgcatctgggacatggtgttcgcagagttccacagcgaggtcgaccgccgcttggtggacggcgccgatcgagcggcgctggaagcgcaggtgaaggccgagctgcgggagaacgtgctcggcggacggtttgtcatggcgctgaccggttccgcgccgatctccgctgagatgacggcgtgggtcgagtccctgctggccgacgtgcatttggtggagggttacggctccaccgaggccgggatggtcctgaacgacggcatggtgcggcgccccgcggtgatcgactacaagctggtcgacgtgcccgagctgggctacttcggcaccgatcagccctacccccggggcgagctgctggtcaagacgcaaaccatgttccccggctactaccagcgcccggatgtcaccgccgaggtgttcgaccccgacggcttctaccggaccggggacatcatggccaaagtaggccccgaccagttcgtctacctcgaccgccgcaacaacgtgctaaagctctcccagggcgagttcatcgccgtgtcgaagctcgaggcggtgttcggcgacagcccgctggtccgacagatcttcatctacggcaacagtgcccgggcctacccgctggcggtggttgtcccgtccggggacgcgctttctcgccatggcatcgagaatctcaagcccgtgatcagcgagtccctgcaggaggtagcgagggcggccggcctgcaatcctacgagattccacgcgacttcatcatcgaaaccacgccgttcaccctggagaacggcctgctcaccggcatccgcaagctggcacgcccgcagttgaagaagttctatggcgaacgtctcgagcggctctataccgagctggccgatagccaatccaacgagctgcgcgagctgcggcaaagcggtcccgatgcgccggtgcttccgacgctgtgccgtgccgcggctgcgttgctgggctctaccgctgcggatgtgcggccggacgcgcacttcgccgacctgggtggtgactcgctctcggcgctgtcgttggccaacctgctgcacgagatcttcggcgtcgacgtgccggtgggtgtcattgtcagcccggcaagcgacctgcgggccctggccgaccacatcgaagcagcgcgcaccggcgtcaggcgacccagcttcgcctcgatacacggtcgctccgcgacggaagtgcacgccagcgacctcacgctggacaagttcatcgacgctgccaccctggccgcagccccgaacctgccggcaccgagcgcccaagtgcgcaccgtactgctgaccggcgccaccggctttttgggtcgctacctggcgctggaatggctcgaccgcatggacctggtcaacggcaagctgatctgcctggtccgcgccagatccgacgaggaagcacaagcccggctggacgcgacgttcgatagcggcgacccgtatttggtgcggcactaccgcgaattgggcgccggccgcctcgaggtgctcgccggcgacaagggcgaggccgacctgggcctggaccgggtcacctggcagcggctagccgacacggtggacctgatcgtggaccccgcggccctggtcaaccacgtgctgccgtatagccagctgttcggcccaaacgcggcgggcaccgccgagttgcttcggctggcgctgaccggcaagcgcaagccatacatctacacctcgacgatcgccgtgggcgagcagatcccgccggaggcgttcaccgaggacgccgacatccgggccatcagcccgacccgcaggatcgacgacagctacgccaacggctacgcgaacagcaagtgggccggcgaggtgctgctgcgcgaagctcacgagcagtgcggcctgccggtgacggtcttccgctgcgacatgatcctggccgacaccagctataccggtcagctcaacctgccggacatgttcacccggctgatgctgagcctggccgctaccggcatcgcacccggttcgttctatgagctggatgcgcacggcaatcggcaacgcgcccactatgacggcttgccggtcgaattcgtcgcagaagccatttgcacccttgggacacatagcccggaccgttttgtcacctaccacgtgatgaacccctacgacgacggcatcgggctggacgagttcgtcgactggctcaactccccaactagcgggtccggttgcacgatccagcggatcgccgactacggcgagtggctgcagcggttcgagacttcgctgcgtgccttgccggatcgccagcgccacgcctcgctgctgcccttgctgcacaactaccgagagcctgcaaagccgatatgcgggtcaatcgcgcccaccgaccagttccgcgctgccgtccaagaagcgaaaatcggtccggacaaagacattccgcacctcacggcggcgatcatcgcgaagtacatcagcaacctgcgactgctcgggctgctgtga

SEQ ID NO: 45 - protein, 1168 aa, Mycobacterium smegmatis
MTIETREDRFNRRIDHLFETDPQFAAARPDEAISAAAADPELRLPAAVKQILAGYADRPALGKRAVEFVTDEEGRTTAKLLPRFDTITYRQLAGRIQAVTNAWHNHPVNAGDRVAILGFTSVDYTTIDIALLELGAVSVPLQTSAPVAQLQPIVAETEPKVIASSVDFLADAVALVESGPAPSRLVVFDYSHEVDDQREAFEAAKGKLAGTGVVVETITDALDRGRSLADAPLYVPDEADPLTLLIYTSGSTGTPKGAMYPESKTATMWQAGSKARWDETLGVMPSITLNFMPMSHVMGRGILCSTLASGGTAYFAARSDLSTFLEDLALVRPTQLNFVPRIWDMLFQEYQSRLDNRRAEGSEDRAEAAVLEEVRTQLLGGRFVSALTGSAPISAEMKSWVEDLLDMHLLEGYGSTEAGAVFIDGQIQRPPVIDYKLVDVPDLGYFATDRPYPRGELLVKSEQMFPGYYKRPEITAEMFDEDGYYRTGDIVAELGPDHLEYLDRRNNVLKLSQGEFVTVSKLEAVFGDSPLVRQIYVYGNSARSYLLAVVVPTEEALSRWDGDELKSRISDSLQDAARAAGLQSYEIPRDFLVETTPFTLENGLLTGIRKLARPKLKAHYGERLEQLYTDLAEGQANELRELRRNGADRPVVETVSRAAVALLGASVTDLRSDAHFTDLGGDSLSALSFSNLLHEIFDVDVPVGVIVSPATDLAGVAAYIEGELRGSKRPTYASVHGRDATEVRARDLALGKFIDAKTLSAAPGLPRSGTEIRTVLLTGATGFLGRYLALEWLERMDLVDGKVICLVRARSDDEARARLDATFDTGDATLLEHYRALAADHLEVIAGDKGEADLGLDHDTWQRLADTVDLIVDPAALVNHVLPYSQMFGPNALGTAELIRIALTTTIKPYVYVSTIGVGQGISPEAFVEDADIREISATRRVDDSYANGYGNSKWAGEVLLREAHDWCGLPVSVFRCDMILADTTYSGQLNLPDMFTRLMLSLVATGIAPGSFYELDADGNRQRAHYDGLPVEFIAEAISTIGSQVTDGFETFHVMNPYDDGIGLDEYVDWLIEAGYPVHRVDDYATWLSRFETALRALPERQRQASLLPLLHNYQQPSPPVCGAMAPTDRFRAAVQDAKIGPDKDIPHVTADVIVKYISNLQMLGLL

SEQ ID NO: 46 - DNA, 3507 bp, Mycobacterium smegmatis
ttacagcaatccgagcatctgcaggttgctgatgtacttgacgatcacgtcggccgtgacgtgcggaatgtccttgtcggggccgatcttcgcgtcctgcaccgcggcacggaaccggtcggtgggtgccatggcaccgcacacgggcggtgagggctgctgatagttgtgcagcagcggcagcagcgaggcctgacgttgccgttccggcagggcccgcagtgcggtttcgaaccggctcagccaggtggcgtagtcgtcgacgcggtgcacggggtagccggcctcgatcagccagtccacgtactcgtcgaggccgatgccgtcgtcgtacgggttcatcacgtggaacgtctcgaatccgtcggtgacctgcgagccgatggtggagatcgcctcggcgatgaactccacgggcagcccgtcgtagtgggcgcgctgccggttgccgtccgcatcgagttcgtagaacgaaccgggcgcgatgccggtcgccacgaggctcagcatcaggcgggtgaacatgtccggcaggttcagctgacccgagtaggtcgtgtcggccaggatcatgtcgcagcggaacaccgagaccggcagaccacaccagtcgtgcgcctcccgcagcaggacctcgccggcccacttgctgttgccgtagccgttggcgtacgagtcgtcgacccggcgcgtcgcgctgatctcgcggatgtcggcgtcctcgacgaacgcctcgggggagatgccctgtcccacaccgatcgtcgagacgtacacgtacggcttgatcgtggtggtcagcgcgatccggatgagttcggcggtgccgagcgcattgggtccgaacatctggctgtacggcaggacgtgattgaccagggcggccggatcgacgatcagatcgacggtgtcggccagtcgctgccacgtgtcgtggtcgagacccagatcggcctcgcccttgtcaccggcgatcacctcgaggtgatcggctgccagcgcgcggtagtgctcgagcagtgtcgcgtccccggtgtcgaacgtggcgtccagacgcgcccgggcctcgtcgtcgctgcgggcgcgcaccaggcagatcaccttgccgtccaccaggtccatgcgctccagccattccagcgccagatagcggcccaggaacccggtggcgccggtcagcagcacggtgcggatctcggtgcccgaacgcggcagacccggcgcggcggacagggtcttggcgtcgatgaacttgcccagggcgagatcacgcgcgcgcacctcggtggcgtcgcgcccgtgcaccgacgcgtatgtggggcgcttggagccgcgcagttcgccctcgatgtaggccgcgacgcctgccaggtcggtggccgggctgacgatgacgccgaccggcacgtcgacatcgaagatctcgtgcaacaggttcgagaagctcaaggccgacaacgaatctccacccagatcggtgaagtgcgcatcggaccgcagatccgtgacggaggcaccgagcagtgcgaccgcggcgcggctgacggtctcgaccacgggccggtcggctccgttgcggcgcaactcgcgcaactcgttggcctgcccctcggccaggtcggtgtagagctgttcgaggcgttcgccgtagtgcgccttcagtttcggccgggccagcttgcggataccggtcagcaggccgttctccagcgtgaaaggtgttgtctcgacgaggaagtcacgcgggatctcatacgactgcaatccggcggctcgtgccgcgtcctgcagtgagtcgctgatgcgcgacttgagttcgtcaccgtcccaacgtgacagtgcctcttcggtcgggaccacgaccgccagcagataggaccgcgcgctgttgccgtagacgtagatctggcgtaccagggggctgtcgccgaacaccgcctccagcttggagaccgtgacgaattcgccctgcgacagtttcagcacgttgttgcggcggtcgaggtattcgagatggtcgggcccgagctcggcgacgatgtcgccggtgcggtagtacccgtcctcgtcgaacatctcggcggtgatctccggacgcttgtagtagccggggaacatctgctcggacttgaccagaagttcgccgcgcgggtagggccggtccgtggcgaagtagccgagatcgggcacgtcgaccagcttgtagtcgatgaccggcgggcgctggatctgcccgtcgatgaacaccgcgccggcctcggtggagccgtagccctccagcagatgcatgtcgagcaggtcctcgacccagctcttcatctccgccgagatgggagccgatccggtcagggccgaaacgaatcgcccgccgagcagttgggtgcggacctcttcgaggactgcggcttcggctcggtcctcggatccctcggcgcggcggttgtcgaggcggctctggtactcctggaacagcatgtcccagatgcgaggaacgaagttgagctgcgtgggccgcacgagggcgaggtcctccaggaaggtggacaggtcgctgcgtgcggcgaagtacgcggttccgccgctggcgagtgtgctgcacaggatgccgcgccccatgacgtgactcatgggcatgaagttcagggtgatcgacggcatcacgccgagggtctcgtcccaccgggccttggacccggcctgccacatcgtggcggtcttggactcggggtacatcgcgcccttgggagtgccggtgctgccggaggtgtagatgagaagggtcagcgggtcggcctcgtcgggcacgtagagcggtgcgtcggcgagtgaccgcccgcggtccagtgcgtcggtgatcgtctcgacgacgacgccggtgcctgcgagcttgcccttggccgcctcgaacgcctcacgctgatcgtcgacctcgtggctgtagtcgaacaccaccagtcgcgacggcgcgggcccggactcgacgagagcgactgcgtcggcgaggaagtcgacgctcgacgcgatcaccttgggctcggtctcggcgacgatcggctgcagttgggccaccggcgcactggtctgcagcggtacggacacggcgccgagttcgagcagggcgatgtcgatcgtcgtgtagtcgacactggtgaaacccaggatggccacgcggtcaccggcattcaccggatggttgtgccaggcattggtcacggcctggatccggcctgcgagctgacggtaggtgatggtgtcgaagcggggcaggagcttcgcggtggtgcggccttcttcgtcggtgacgaactcgacggcgcgcttgcccagcgcagggcggtccgcatagccggccagaatctgtttgaccgcggcaggaaggcgcaactccggatcggcggcagccgcgctgatcgcctcgtcgggacgggcggcggcgaactgcgggtcggtttcgaacaagtggtcaatgcgccggttgaagcggtcttcgcgcgtttcgatcgtcat

SEQ ID NO: 47 - protein, 1173 aa, Mycobacterium smegmatis
MTSDVHDATDGVTETALDDEQSTRRIAELYATDPEFAAAAPLPAVVDAAHKPGLRLAEILQTLFTGYGDRPALGYRARELATDEGGRTVTRLLPRFDTLTYAQVWSRVQAVAAALRHNFAQPIYPGDAVATIGFASPDYLTLDLVCAYLGLVSVPLQHNAPVSRLAPILAEVEPRILTVSAEYLDLAVESVRDVNSVSQLVVFDHHPEVDDHRDALARAREQLAGKGIAVTTLDAIADEGAGLPAEPIYTADHDQRLAMILYTSGSTGAPKGAMYTEAMVARLWTMSFITGDPTPVINVNFMPLNHLGGRIPISTAVQNGGTSYFVPESDMSTLFEDLALVRPTELGLVPRVADMLYQHHLATVDRLVTQGADELTAEKQAGAELREQVLGGRVITGFVSTAPLAAEMRAFLDITLGAHIVDGYGLTETGAVTRDGVIVRPPVIDYKLIDVPELGYFSTDKPYPRGELLVRSQTLTPGYYKRPEVTASVFDRDGYYHTGDVMAETAPDHLVYVDRRNNVLKLAQGEFVAVANLEAVFSGAALVRQIFVYGNSERSFLLAVVVPTPEALEQYDPAALKAALADSLQRTARDAELQSYEVPADFIVETEPFSAANGLLSGVGKLLRPNLKDRYGQRLEQMYADIAATQANQLRELRRAAATQPVIDTLTQAAATILGTGSEVASDAHFTDLGGDSLSALTLSNLLSDFFGFEVPVGTIVNPATNLAQLAQHIEAQRTAGDRRPSFTTVHGADATEIRASELTLDKFIDAETLRAAPGLPKVTTEPRTVLLSGANGWLGRFLTLQWLERLAPVGGTLITIVRGRDDAAARARLTQAYDTDPELSRRFAELADRHLRVVAGDIGDPNLGLTPEIWHRLAAEVDLVVHPAALVNHVLPYRQLFGPNVVGTAEVIKLALTERIKPVTYLSTVSVAMGIPDFEEDGDIRTVSPVRPLDGGYANGYGNSKWAGEVLLREAHDLCGLPVATFRSDMILAHPRYRGQVNVPDMFTRLLLSLLITGVAPRSFYIGDGERPRAHYPGLTVDFVAEAVTTLGAQQREGYVSYDVMNPHDDGISLDVFVDWLIRAGHPIDRVDDYDDWVRRFETALTALPEKRRAQTVLPLLHAFRAPQAPLRGAPEPTEVFHAAVRTAKVGPGDIPHLDEALIDKYIRDLREFGLI

SEQ ID NO: 48 - DNA, 3522 bp, Mycobacterium smegmatis
atgaccagcgatgttcacgacgccacagacggcgtcaccgaaaccgcactcgacgacgagcagtcgacccgccgcatcgccgagctgtacgccaccgatcccgagttcgccgccgccgcaccgttgcccgccgtggtcgacgcggcgcacaaacccgggctgcggctggcagagatcctgcagaccctgttcaccggctacggtgaccgcccggcgctgggataccgcgcccgtgaactggccaccgacgagggcgggcgcaccgtgacgcgtctgctgccgcggttcgacaccctcacctacgcccaggtgtggtcgcgcgtgcaagcggtcgccgcggccctgcgccacaacttcgcgcagccgatctaccccggcgacgccgtcgcgacgatcggtttcgcgagtcccgattacctgacgctggatctcgtatgcgcctacctgggcctcgtgagtgttccgctgcagcacaacgcaccggtcagccggctcgccccgatcctggccgaggtcgaaccgcggatcctcaccgtgagcgccgaatacctcgacctcgcagtcgaatccgtgcgggacgtcaactcggtgtcgcagctcgtggtgttcgaccatcaccccgaggtcgacgaccaccgcgacgcactggcccgcgcgcgtgaacaactcgccggcaagggcatcgccgtcaccaccctggacgcgatcgccgacgagggcgccgggctgccggccgaaccgatctacaccgccgaccatgatcagcgcctcgcgatgatcctgtacacctcgggttccaccggcgcacccaagggtgcgatgtacaccgaggcgatggtggcgcggctgtggaccatgtcgttcatcacgggtgaccccacgccggtcatcaacgtcaacttcatgccgctcaaccacctgggcgggcgcatccccatttccaccgccgtgcagaacggtggaaccagttacttcgtaccggaatccgacatgtccacgctgttcgaggatctcgcgctggtgcgcccgaccgaactcggcctggttccgcgcgtcgccgacatgctctaccagcaccacctcgccaccgtcgaccgcctggtcacgcagggcgccgacgaactgaccgccgagaagcaggccggtgccgaactgcgtgagcaggtgctcggcggacgcgtgatcaccggattcgtcagcaccgcaccgctggccgcggagatgagggcgttcctcgacatcaccctgggcgcacacatcgtcgacggctacgggctcaccgagaccggcgccgtgacacgcgacggtgtgatcgtgcggccaccggtgatcgactacaagctgatcgacgttcccgaactcggctacttcagcaccgacaagccctacccgcgtggcgaactgctggtcaggtcgcaaacgctgactcccgggtactacaagcgccccgaggtcaccgcgagcgtcttcgaccgggacggctactaccacaccggcgacgtcatggccgagaccgcacccgaccacctggtgtacgtggaccgtcgcaacaacgtcctcaaactcgcgcagggcgagttcgtggcggtcgccaacctggaggcggtgttctccggcgcggcgctggtgcgccagatcttcgtgtacggcaacagcgagcgcagtttccttctggccgtggtggtcccgacgccggaggcgctcgagcagtacgatccggccgcgctcaaggccgcgctggccgactcgctgcagcgcaccgcacgcgacgccgaactgcaatcctacgaggtgccggccgatttcatcgtcgagaccgagccgttcagcgccgccaacgggctgctgtcgggtgtcggaaaactgctgcggcccaacctcaaagaccgctacgggcagcgcctggagcagatgtacgccgatatcgcggccacgcaggccaaccagttgcgcgaactgcggcgcgcggccgccacacaaccggtgatcgacaccctcacccaggccgctgccacgatcctcggcaccgggagcgaggtggcatccgacgcccacttcaccgacctgggcggggattccctgtcggcgctgacactttcgaacctgctgagcgatttcttcggtttcgaagttcccgtcggcaccatcgtgaacccggccaccaacctcgcccaactcgcccagcacatcgaggcgcagcgcaccgcgggtgaccgcaggccgagtttcaccaccgtgcacggcgcggacgccaccgagatccgggcgagtgagctgaccctggacaagttcatcgacgccgaaacgctccgggccgcaccgggtctgcccaaggtcaccaccgagccacggacggtgttgctctcgggcgccaacggctggctgggccggttcctcacgttgcagtggctggaacgcctggcacctgtcggcggcaccctcatcacgatcgtgcggggccgcgacgacgccgcggcccgcgcacggctgacccaggcctacgacaccgatcccgagttgtcccgccgcttcgccgagctggccgaccgccacctgcgggtggtcgccggtgacatcggcgacccgaatctgggcctcacacccgagatctggcaccggctcgccgccgaggtcgacctggtggtgcatccggcagcgctggtcaaccacgtgctcccctaccggcagctgttcggccccaacgtcgtgggcacggccgaggtgatcaagctggccctcaccgaacggatcaagcccgtcacgtacctgtccaccgtgtcggtggccatggggatccccgacttcgaggaggacggcgacatccggaccgtgagcccggtgcgcccgctcgacggcggatacgccaacggctacggcaacagcaagtgggccggcgaggtgctgctgcgggaggcccacgatctgtgcgggctgcccgtggcgacgttccgctcggacatgatcctggcgcatccgcgctaccgcggtcaggtcaacgtgccagacatgttcacgcgactcctgttgagcctcttgatcaccggcgtcgcgccgcggtcgttctacatcggagacggtgagcgcccgcgggcgcactaccccggcctgacggtcgatttcgtggccgaggcggtcacgacgctcggcgcgcagcagcgcgagggatacgtgtcctacgacgtgatgaacccgcacgacgacgggatctccctggatgtgttcgtggactggctgatccgggcgggccatccgatcgaccgggtcgacgactacgacgactgggtgcgtcggttcgagaccgcgttgaccgcgcttcccgagaagcgccgcgcacagaccgtactgccgctgctgcacgcgttccgcgctccgcaggcaccgttgcgcggcgcacccgaacccacggaggtgttccacgccgcggtgcgcaccgcgaaggtgggcccgggagacatcccgcacctcgacgaggcgctgatcgacaagtacatacgcgatctgcgtgagttcggtctgatctga

SEQ ID NO: 49 - protein, 1174 aa, Mycobacterium ulcerans
MSPITREERLERRIQDLYANDPQFAAAKPVTAITAAIERPGLPLPQIIETVMTGYADRPALAQRSVEFVTDAGTGHTTLRLLPHFETISYGELWDRISALADVLSTEQTVKPSDRVCLLGFNSVDYATIDMTLARLGAVAVPLQTSAAITQLQPIVAETQPTMIAASVDALADATELALSGQTATRVLVFDHHRQVDAHRAAVESARERLAGSAVVETLAEAIARGDVPRGASAGSAPGTDVSDDSLALLIYTSGSTGAPKGAMYPRRNVATFWRKRTWFEGGYEPSITLNFMPMSHVMGRQILYGTLCNGGTAYFVVKSDLSTLFEDLALVRPTELTFVPRVWDMVFDEFQSEVDRRLVDGADRVALEAQVKAEIRNDVLGGRYTSALTGSAPISDEMKAWVEELLDMHLVEGYGSTEAGMILIDGAIRRPAVLDYKLVDVPDLGYFLTDRPHPRGELLVKTDSLFPGYYQRAEVTADVFDADGFYRTGDIMAEVGPEQFVYLDRRNNVLKLSQGEFVTVSKLEAVFGDSPLVRQIYIYGNSARAYLLAVIVPTQEALDAVPVEELKARLGDSLQEVAKAAGLQSYEIPRDFIIETTPWTLQNGLLTGIRKLARPQLKKHYGELLEQIYTDLAHGQADELRSLRQSGADAPVLVTVCRAAAALLGGSASDVQPDAHFTDLGGDSLSALSFTNLLHEIFDIDVPVGVIVSPANDLQALADYVEAARKPGSSRPTFASVHGASNEQVTEVHAGDLSLDKFIDAATLAEAPRLPAANTQVRTVLLTGATGFLGRYLALEWLERMDLVDGKLICLVRAKSDTEARARLEKTFDSGAPELLAHYRALAGDHLEVLAGDKGEADLGLDRQTWQRLADTVDLIVDPAALVNHVLPYSQLFGPNALGTAELLRLALTSKIKPYSYTSTIGVADQIPPSAFTEDADIRVISATRAVDDSYANGYSNSKWAGEVLLREAHVLCGLPVAVFRCDMILADTTWAGQLNVPDMFTRMILSLAATGIAPGSFYELAADGARQRAHYDGLPVEFIAEAISTLGAQSQDGFHTYHVMNPYDDGIGLDEFVDWLNESGCPIQRIADYGDWLQRFETALRALPDRQRHSSLLPLLHNYRQPERPVRGSIAPTDRFRAAVQEAKIGPDKDIPHVGAPIIVKYVSDLRLLGLL

SEQ ID NO: 50 - DNA, 3525 bp, Mycobacterium ulcerans
atgtcgccaatcacgcgtgaagagcggctcgagcgccgcatccaggacctctacgccaacgacccgcagttcgccgccgccaaacccgtcacggcgatcaccgcagcaatcgagcggccgggtctaccgctaccccagatcatcgagaccgtcatgaccggatacgccgatcggccggctctcgctcagcgctcggtcgaattcgtgaccgatgccggcaccggccacaccacgctgcgactgctcccccacttcgaaaccatcagctacggcgagctttgggaccgcatcagcgcactggccgacgtgctcagcaccgaacagacggtgaaaccgagcgaccgggtctgcttgttgggcttcaacagcgtcgactacgccacgatcgacatgactttggcgcggctgggcgcggtggctgtaccactgcagaccagcgcggcgataacccagctgcagccgatcgtcgccgagacccagcccaccatgatcgcggccagcgtcgacgcactcgctgacgccaccgaattggctctgtccggtcagaccgctacccgagtcctggtgttcgaccaccaccggcaggttgacgcacaccgcgcagcggtcgaatccgcccgggagcgcctggctggctcggcggtcgtcgaaaccctggccgaggccatcgcgcgcggcgacgtgccccgcggtgcgtccgccggctcggcgcccggcaccgatgtgtccgacgactcgctcgcgctactgatctacacctcgggcagcaccggtgcgcccaagggcgcgatgtacccccgacgcaacgttgcgaccttctggcgcaagcgcacctggttcgaaggcggctacgagccgtcgatcacgctgaacttcatgccaatgagccacgtcatgggccgccaaatcctgtacggcacgctgtgcaatggcggcaccgcctacttcgtggtgaaaagcgatctctccaccttgttcgaagacctggcgctggtgcggcccaccgagctgaccttcgtgccgcgcgtgtgggacatggtgttcgacgagtttcagagtgaggtcgaccgccgcctggtcgacggcgccgaccgggtcgcgctcgaagcccaggtcaaggccgagatacgcaacgacgtgctcggtggacggtataccagcgcactgaccggctccgccccgatctccgacgagatgaaggcgtgggtcgaggagctgctcgacatgcatctggtcgagggctacggctccaccgaggccgggatgatcctgatcgacggagccattcggcgcccggcggtactcgactacaagctggtcgatgttcccgacctgggttacttcctgaccgaccggccacatccgcggggcgagttgctggtcaagaccgatagtttgttcccgggctactaccagcgagccgaagtcaccgccgacgtgttcgatgctgacggcttctaccggaccggcgacatcatggccgaggtcggccccgaacagttcgtgtacctcgaccgccgcaacaacgtgttgaagctgtcgcagggcgagttcgtcaccgtctccaaactcgaagcggtgtttggcgacagcccactggtacggcagatctacatctacggcaacagcgcccgtgcctacctgttggcggtgatcgtccccacccaggaggcgctggacgccgtgcctgtcgaggagctcaaggcgcggctgggcgactcgctgcaagaggtcgcaaaggccgccggcctgcagtcctacgagatcccgcgcgacttcatcatcgaaacaacaccatggacgctgcagaacggcctgctcaccggcatccgcaagttggccaggccgcagctgaaaaagcattacggcgagcttctcgagcagatctacacggacctggcacacggccaggccgacgaactgcgctcgctgcgccaaagcggtgccgatgcgccggtgctggtgacggtgtgccgcgcggcggccgcgctgttgggcggcagcgcctctgacgtccagcccgatgcgcacttcaccgatttgggcggcgactcgctgtcggcgctgtcgttcaccaacctgctgcacgagatcttcgacatcgatgtgccggtgggcgtcatcgtcagccccgccaacgacttgcaggccctggccgactacgtcgaggcggctcgcaaacccggctcgtcacgaccgaccttcgcctcggtccacggcgcctcgaatgagcaggtcaccgaggtgcatgccggtgacctgtccctggacaaattcatcgatgccgcaaccctggccgaagctccccggctgcccgccgcaaacacccaagtgcgcaccgtgctgctgaccggcgccaccggcttcctcgggcgctacctggccctggaatggctggagcggatggacctggtcgacggcaaactgatctgcctggtccgggccaagtccgacaccgaagcacgggcgcggctggaaaagacgttcgacagcggcgcccccgaactgctggcccactaccgcgcactggccggcgaccacctcgaggtgctcgccggtgacaagggcgaagccgacctcggactggaccggcagacctggcaacgcctggccgacacggtcgacctgatcgtggaccccgcggccctggtcaaccacgtactgccatacagccagctgttcgggcccaacgcgctgggcaccgccgagctgctgcggctcgcgctcacctccaagatcaagccctacagctacacctcgacaatcggtgtcgccgaccagatcccgccgtcggcgttcaccgaggacgccgacatccgggtcatcagcgccacccgcgcggtcgacgacagctacgccaatggctattcgaacagcaagtgggccggcgaggtgctgttgcgcgaggcgcatgtcctgtgtggcctgccggttgcggtgttccgctgcgacatgatcctggccgacaccacatgggcgggacagctcaacgtgccggacatgttcacccgtatgatcctgagcctggcggccaccggtatcgcgccgggttcgttctatgagcttgcggccgacggcgcccggcaacgcgcccactatgacggtctgcccgtcgagttcatcgccgaggcgatttcgactttgggtgcgcagagccaggatgggttccacacgtatcacgtgatgaacccttacgacgacggcatcggactcgacgagttcgtcgactggctcaacgagtccggttgccccatccagcgcatcgctgactatggcgactggctgcagcgcttcgaaaccgcactgcgcgcactgcccgatcggcagcggcacagctcactgctgccgctgttgcacaactatcggcagccggagcggcccgtccgcgggtcgatcgcccctaccgatcgcttccgggcagcggtgcaagaggccaagatcggccccgacaaagacattccgcacgtcggcgcgccgatcatcgtgaagtacgtcagcgacctgcgcctactcggcctgctctga

SEQ ID NO: 51 - protein, 1105 aa, Tsukamurella paurometabolum
MSIETVQNGVPAEGSVPPADQQTERLPQVIARIFAQFADRPAFATREAGPGTPYATVSYREIWRRVTALVASWQSEVAPGDFVAILGFTSSDFVTVDLATTLLGAPNVPLQAGAPAARIATILDETRPKILAVSADQVDLAQEALAESAATPRVVVFDGERDGYEGIEADILSGSALPAPEFFAPEPGTDPLVTLIYTSGSTGTPKGAMYTEQLVRDAWLKVDSIVDIDMPAESLLHFLPMSHMYGRNWLIAGLASGGTGYFAGASDMSTLFDDLAAARPTAIGLVPRVCELIHQRYLAVEADTDAETARVELRDRVLGGRLQAAMCGSAALSSELQTFMEWLLGIDIQIGYGSTEAGGVIRDGVVVRPPVTEYKLIDVPELGYFVTDSPHPRGELLVKSTQLIPGYYNSDKRIRDDEGFYRTGDVMAELGPDRLEYVDRRSNVIKLAQGEFVPIAQLEAIYAAGPDVHQIFLYGTSERSYLIGVVVPAPGPDGETDAQTRTRVLDGLAAIARENDLAAYEVPRDVLIERDPFSQENGLRSGIGKLVRPALIARYGDRLHDLYAQADTRQREGLRALDASGPIIDTVLGAAALTLGADIADFDADTRFGDLGGDSLSALSLATTLEGLYDVPVPVQTIVGPTATLGGVARHIEKARSGGVAAPTADSVHGVGASVARATDLTLEKFIDPELLALAPTLPAATGEPNTVLLTGSTGYLGRFLLLDWLRRVAPHGGTVIALVRGADADDARRRVTAAIGDSDPDLTQEFTSLAEHHLHVIAGDFGSPALGLDDATWSDLAGRVDHVVHCGALVNHVLPYDQLFGPNVVATGEVVRLALTTRRKSVDYVSTVAVVPQDDGRVLVEDDDVRELGAERRIGADAYANGYAVSKWAGEVLLHEAADLADLPVRVFRSDMILAHSRFHGQFNEVDQFTRLLLSIAETGLAPASFYTPDPSGHRPHYDGLPVDFTAEAITTLSAAGRSGYRTFHVLNANDDGVSLDSFVDWIAASGRSIERIDDYDTWFARFEQALQQLPDEARQRSVLPLLHAVREPAPAAGTSALSVDRFRGAVRETGVGPGDIPVLDRALIEKYLRDFETAGWLAPGARD

SEQ ID NO: 52 - DNA, 3318 bp, Tsukamurella paurometabolum
atgtcgattgagacggtgcagaacggcgtccccgcagagggctcggtgccccccgccgaccagcagaccgagcgactgccgcaggtgatcgccaggatcttcgcccagttcgcggatcgtccggccttcgcgacccgcgaggcggggccggggaccccctacgccaccgtctcctatcgggagatctggcggcgcgtcaccgcgctggtggcctcctggcagagcgaagtggctccgggagacttcgtcgccatcctcggcttcaccagctcggacttcgtgaccgtcgacctcgcgaccacactgctcggcgccccgaacgtgccgctccaggccggggcccccgccgctcgcatcgcgaccatcctcgatgagacccggccgaagatcctcgccgtgagtgccgatcaggtcgacctcgcccaggaggctctggccgagtccgcggctaccccgcgggtggtcgtcttcgacggcgaacgcgacggctacgagggcatcgaggcggacatcctttccggctccgccctgccggcaccggagttcttcgcgcccgagcccggcaccgatcctctcgtcacgctcatctacacatccggcagcaccggtaccccgaagggggccatgtacaccgagcagttggttcgcgatgcctggctcaaggtggacagcatcgtcgacatcgacatgccggccgagtcgctcctgcacttcctgcctatgagccatatgtacgggcgcaactggctgatcgccggcctggcatcgggcgggaccgggtacttcgccggcgcctccgatatgtccaccctgttcgacgacctcgccgccgcccggcccaccgccatcggcctggtgccccgcgtgtgcgagctgatacaccagcgctatctggccgtcgaggcggacactgatgcggagaccgcgcgcgtcgaactgcgtgaccgggtactcggcggtcggctgcaggccgcgatgtgcggtagcgccgccctctcgtcggagctgcagaccttcatggagtggttgctcggaatcgatatccagatcggctacggatccaccgaggccggtggtgtcatccgcgacggagtggtcgttcggccgccggtcacggagtacaagctgatcgatgtccccgaactgggctacttcgtcaccgactccccgcatccacgcggcgaactcctggtcaagtcgacgcagttgattcccgggtactacaactccgacaagcggatccgcgacgacgaaggcttctaccgcaccggcgatgtgatggccgagctgggacccgaccggctcgagtacgtcgaccggcggagcaacgtgatcaagttggcacagggagagttcgtgccgatcgcccaactcgaggccatctacgccgccggtcccgatgtgcaccagatcttcctgtacggaaccagcgaacgctcctacctgatcggcgtcgtcgtgcccgcgccgggacccgacggcgagaccgatgcgcagacccgcacccgcgtactcgatggcctggccgcgatcgcccgtgagaacgatctcgctgcctacgaggtgccgcgcgatgtgctcatcgaacgtgatcccttctctcaggagaacgggctgcggtcggggatcggcaagctggtgcgcccggccctcatcgcccgctacggtgaccggttgcacgacctctacgcccaggccgacacccgtcaacgcgagggcttgcgcgctctcgacgcctcgggcccgatcatcgacaccgtgctcggggcggctgcgttgacgctcggcgcggatatcgcggacttcgacgccgacactcgattcggcgacctcggtggcgactcgttgtcggcgctctcgctcgcgacgacgctcgaaggcctctacgacgtgcccgtccccgtgcagacgatcgtcggaccgaccgccacactcggcggcgtcgcccggcacatcgagaaggctcgatcgggtggcgtcgcggcaccgaccgccgactcggtgcacggcgtgggtgcgagcgtcgcccgggccaccgacctgacgctggagaagttcatcgaccccgagctcctcgcgctcgcgccgacgcttcccgcggcgaccggtgagccgaacaccgtgctgctcaccggatccaccggctacctcggccgcttcctgctgctggactggttgcgacgggtcgctccgcacggcggcaccgtgatcgcgctggtgcgcggcgccgacgccgacgatgcgcgacgccgcgtcacggccgcgatcggtgactcggatcctgacctgacacaagagttcacgtcactcgcggagcatcacctccacgtgatcgccggtgacttcggcagccccgcactcggactcgacgatgccacctggagcgatctcgccgggcgagtcgatcacgtggtgcactgcggcgcgctcgtcaaccacgtgctgccctacgaccaactgttcggtcccaatgtggtggccaccggcgaagtggtgcgactcgcactcaccacgcgccgcaagtccgtggattacgtctccacggtggctgtggttccgcaggatgacggccgcgtcctggtcgaggacgacgatgttcgcgagctcggcgccgaacggcgcatcggggccgatgcctacgcgaacggctacgccgtgagcaaatgggcgggcgaagtgctgttgcatgaggcagccgacctggcggacctgccggtgcgggtgttccgctccgatatgatcttggcgcacagtcgattccacggacagttcaacgaggtcgaccagttcacccgcctgctcctgagtatcgccgagaccggactggcgccggcgtcgttctacacgccggatccgagtggacaccgcccgcactacgacgggctgccggtggacttcaccgccgaagcgatcaccacgctcagcgccgcggggcgttcggggtaccggaccttccacgtgctcaacgccaacgatgacggcgtgagcctggacagcttcgtcgactggatcgccgcctcgggccggagcatcgaacggatcgacgactacgacacctggttcgcccggttcgagcaggcgctccagcagctccccgatgaggcgcgccagcggtcggtgctgcccctgctgcacgcggtgcgcgagccggctccggccgccgggacctccgcgctgtcggtggaccggttccgtggtgcggtgcgtgagaccggagtaggaccgggggacatcccggtgctcgatcgcgccctgatcgagaagtacctgcgcgacttcgagaccgcgggctggctcgcgcccggtgcgcgcgactga

SEQ ID NO: 53 - protein, 1144 aa, Cyanobium sp. PCC 7001
MNESSADQSSGNVSEGWPDASVTARALQAHLRYEQIIDAILSGYAERPALAERSYLVRPDPSTGQTVRVHEQAFRSISYRTLQERVHALTMAWRLHPDSPVQAGAFVVLVGFASIDYAVLDLALAYTKGVPVPLSPNHSSEDDDAILGTVQPVTLAVSISEFSGCVDLIARSTSIRTVIVFDLDPAVDCERAALESGIRALNEKGSDVVVQTLQDLIDVGRDAEFSFLPIQAQDQDDLALLIHTSGSTGTPKGACISSRALINTWRHVSGPYPKVTVVLAPFHHMMGRDSMITALGAGGTAYFTLRPDLSTVIEDIRLARPTGLVLFPRLCEVIEHHLTTAPEYSGNEILGGRLQSIVVASAPITPRLKASLECLLGVPVSEGYSSTETASGGLAMNGLLNRNNILAYRLRDVPEAGYSVNDRPFPRGELCVKTRFGISGYFRNPEATAELFDDDGFYCTGDIVEERAPDQIAIIDRRKNVIKLAQGEYVAVGRLEQLFQEGCGCVQQIHLHGDSTRAYLLAVVVPDRNTLAPPGSRQASEAELKARVREEILTLANQRELRGFEIPRDLILAEEPFSQQNGLLSSLGKPIRPAIRARYRSRLESLYASHEATRGTELEAIRASAGAVDVETTLLALLSSTLGVVCGAADRQTSFRELGGDSLAAVQLAMEIKKQFGVGLEGSQILGPGGTVEAWARRIHTASIQQAPHQRVGSPLAAIPAEGWLKPDHYRLENLIGIPIGTPSAEVARPTGGPPTVLLTGATGFLGGRLCLEWLQRLAGQGGRLICLVRPSNSHSAWERLRNRFSHLEPEQVARFRELAGRHLEVIPADIGEPGLGLEPGCQERLATEVDAICHCAAEVNHRLPYRHLYRPNVIGTAEIIHLAITTRLKSVDFISSIGVASLPRRPGGSIPVEGGYARGYFASKWACEQLLRSTHDCTGVPVRVIRPSLILPDRVLAGEMNPDDLLSRLLYSILVTGIAPGCFGEESQNSGRSGFSVQGLPVDQLAQTILALGEARTEGFHVLNLNADSGSGVPLDAILQDIAAKGIRLRRVEGYDLWLDAITTRLRRLPAEQRARSLLDVAEAYAGSAGQTTQSSGEMQAGSSSCPEEITSLQPDFSRAYRRKIVDDLARWGLIEPPGPVDQ

SEQ ID NO: 54 - DNA, 3435 bp, Cyanobium sp. PCC 7001
gtgaatgagtcttccgcggaccagagttccggcaacgtttccgaggggtggcctgatgcttcggtcacagcacgggccctgcaggctcacctgcgctacgaacagatcatcgatgccattctgagcggctacgccgagcgccctgctctggcggagcgttcctacctggtgcggccggacccgagcacaggtcaaacggtgcgtgtccacgagcaggccttccgctcgatcagctaccgaaccctgcaggaacgggttcatgccctcaccatggcctggcgccttcatcccgatagcccggtgcaagcgggagccttcgtggtgctggtgggatttgccagcatcgattacgccgttcttgatctggcactggcctacaccaagggcgtgccggtgcccctgtcaccgaaccattccagcgaggacgatgacgccatcctcggcacagtccagcccgtcactctggcggtatcgatcagtgagttctctggctgtgtcgacctgatcgcccgatcgacgtcgatccgaactgtgatcgtctttgaccttgaccctgccgtcgactgcgagcgcgccgcactggagagcggcatccgggcactcaacgagaaggggtcagacgttgtcgttcagacactgcaggatctgattgacgttgggagagacgcagagttcagcttcctgccgatccaggcgcaggatcaagatgacctggcacttctgattcacacatccggcagcacaggcacacccaagggagcctgcatctcatcccgtgcactgatcaacacctggcgccatgtttccggtccctatccaaaagtgaccgtggttctggcacccttccaccacatgatgggacgagactcgatgatcacggcattgggcgcgggcggcaccgcctacttcacgctcaggcctgacctttcgaccgtgattgaagacatcagactggcacggcccacaggcctggtgctgtttccccgcctctgcgaagtgatcgaacaccacctgactactgcgccggagtattcaggcaacgagatcctcggaggcagactgcaatccattgtggtggcctcggctccgatcacgccacgcttgaaggcatccctggagtgcctccttggggtgcctgtgagcgaaggctacagcagcacggaaacagccagtggcgggctggcgatgaatggactgctgaaccgcaacaacattctcgcgtatcgccttcgcgatgtgcccgaggcagggtattcagtgaatgatcggccctttccgcgcggagaactctgcgtgaagacccgcttcggtatctcaggctatttcagaaatccagaggccactgcagagctgttcgacgacgatggcttctattgcaccggtgacatcgttgaagagcgggcccccgatcaaatcgccatcatcgaccggcgaaagaatgtcatcaagctggcgcagggtgaatatgtcgctgtgggcaggctggaacagcttttccaggaaggttgtggttgcgtgcagcagattcacctccacggcgacagcacaagggcctatctgctggcagtcgtggtacctgatcgcaacacccttgcaccgcccgggtcacggcaggccagtgaggccgagttaaaggcacgggtgcgcgaggagattctcaccttggcaaaccaacgggagctgcgcggcttcgagatccctcgagacctgatcctggcggaggaacccttctcccagcagaacggtctgctgtcgtccttgggtaagccgatccgcccggccatccgcgcgcgctaccgcagccggctggagagcctgtatgccagccatgaggccacccgaggcactgagctcgaggccatcagagcgtcagctggcgcggtggatgtggaaaccaccctgttggcgctgctgagcagcacgctgggtgtggtgtgtggggctgccgatcggcagacgagtttccgcgagctggggggcgactccctggccgctgtgcagctggcgatggagatcaagaagcagttcggggtggggctggaagggagccagattctcgggccgggcggcacggtggaagcgtgggcgcggaggatccacaccgcctccatccagcaggccccgcaccagcgggttggcagtcccctcgccgccattccggccgaggggtggctgaagccggaccactacaggctggagaacctgatcgggattcccatcggtacaccctcagccgaggtggccaggcccacaggcgggccccctacggttctgctcaccggtgccaccggttttctgggggggcgcttgtgcctggagtggctgcaacggctggctggccaggggggcaggctgatctgtctggtgcgcccctcgaacagccattccgcctgggagcgactgaggaaccgcttctcccatctggaacccgagcaggtggcacgcttccgcgagctggcgggaaggcatctggaggtgattccggcggacatcggagagcccggcctggggcttgaaccgggttgccaggagcggctcgccactgaggtggacgcgatctgtcactgcgcagcggaagtgaatcaccggctgccctatcgccacctctaccggcccaatgtgatcggcaccgcggagatcattcacctggcgatcacgacgcggctgaaatcggtggacttcatctccagcatcggggtggcttccctgccccggcggccgggagggagcatcccggtggagggcggctacgcccggggctacttcgccagcaagtgggcttgcgagcaactgctgcgctccacccatgactgcaccggtgtgcccgtacgggtgattcggcccagcctcattcttcccgatcgtgtgctggccggggagatgaacccggacgatctgctttcaagactgctgtacagcatcctggtgaccgggatcgcccccgggtgctttggggaggagtcgcagaacagtggacgatcggggttctcggtgcagggcctccccgtcgaccagttggcgcagaccatccttgccctcggggaagcgcgcacggagggatttcatgtgctcaacctcaacgctgacagtggcagcggtgttcccctggatgccatcctccaggacatcgccgccaaaggaatcaggctgcgacgggtggagggctatgacctctggctcgacgcgatcacaacccgcctgcgtcgcctgccagccgagcaacgggcccgttccctgctggatgtggcggaagcctatgcaggatcagcaggccagacaacgcagagcagcggtgaaatgcaggcgggcagcagctcctgcccggaggagatcaccagcctgcaaccggacttcagtagggcctacaggcgcaagatcgtggatgatctggctcggtgggggctgatcgagcctccaggacccgtggatcagtga

SEQ ID NO: 55 - protein, 1173 aa, Mycobacterium avium
MSTATHDERLDRRVHELIATDPQFAAAQPDPAITAALEQPGLRLPQIIRTVLDGYADRPALGQRVVEFVTDAKTGRTSAQLLPRFETITYGEVAQRVSALGRALSDDAVHPGDRVCVLGFNSVDYATIDMALGAIGAVSVPLQTSAAISSLQPIVAETEPTLIASSVNQLSDAVQLITGAEQAPTRLVVFDYHPQVDDQREAVQDAAARLSGTGVAVQTLAELLERGKDLPAVAEPPADEDSLALLIYTSGSTGAPKGAMYPQSNVGKMWRRGSKNWFGESAASITLNFMPMSHVMGRSILYGTLGNGGTAYFAARSDLSTLLEDLELVRPTELNFVPRIWETLYGEFQRQVERRLSEAGDAGERRAVEAEVLAEQRQYLLGGRFTFAMTGSAPISPELRNWVESLLEMHLMDGYGSTEAGMVLFDGEIQRPPVVDYKLVDVPDLGYFSTDRPHPRGELLLRTENMFPGYYKRAETTAGVFDEDGYYRTGDVFAEIAPDRLVYVDRRNNVLKLAQGEFVTLAKLEAVFGNSPLIRQIYVYGNSAQPYLLAVVVPTEEALASGDPETLKPKIADSLQQVAKEAGLQSYEVPRDFIIETTPFSLENGLLTGIRKLAWPKLKQHYGERLEQMYADLAAGQADELAELRRNGAQAPVLQTVSRAAGAMLGSAASDLSPDAHFTDLGGDSLSALTFGNLLREIFDVDVPVGVIVSPANDLAAIASYIEAERQGSKRPTFASVHGRDATVVRAADLTLDKFLDADTLASAPNLPKPATEVRTVLLTGATGFLGRYLALEWLERMDMVDGKVIALVRARSDEEARARLDKTFDSGDPKLLAHYQQLAADHLEVIAGDKGEANLGLRQDVWQRLADTVDVIVDPAALVNHVLPYSELFGPNALGTAELIRLALTSKQKPYTYVSTIGVGDQIEPGKFVENADIRQMSATRAINDSYANGYGNSKWAGEVLLREAHDLCGLPVAVFRCDMILADTTYAGQLNLPDMFTRLMLSLVATGIAPGSFYELDADGNRQRAHYDGLPVEFIAAAISTLGSQITDSDTGFQTYHVMNPYDDGIGLDEYVDWLVDAGYSIERIADYSEWLRRFETSLRALPDRQRQYSLLPLLHNYRTPEKPINGSIAPTDVFRAAVQEAKIGPDKDIPHVSPPVIVKYITDLQLLGLL

SEQ ID NO: 56 - DNA, 3522 bp, Mycobacterium avium
atgtcgactgccacccatgacgaacgactcgaccgtcgcgtccacgaactcatcgccaccgacccgcaattcgccgccgcccaacccgacccggcgatcaccgccgccctcgaacagcccgggctgcggctgccgcagatcatccgcaccgtgctcgacggctacgccgaccggccggcgctgggacagcgcgtggtggagttcgtcacggacgccaagaccgggcgcacgtcggcgcagctgctcccccgcttcgagaccattacgtacggcgaagtggcgcagcgtgtttcggcgctgggccgcgccctgtctgacgacgcggtgcaccccggcgaccgggtgtgcgtgctgggcttcaacagcgtcgactacgccaccatcgacatggcgctgggcgccatcggcgccgtctcggtgccgctgcagaccagcgcggcaatcagctcgctgcagccgatcgtggccgagaccgagcccaccctgatcgcgtccagcgtgaaccagctgtccgacgcggtgcagctgatcaccggcgccgagcaggcgcccacccggctggtggtgttcgactaccacccgcaggtcgacgaccagcgcgaggccgtccaggacgccgcggcgcggctgtccggcaccggcgtggccgtccagacgctggccgagctgctggagcgcggcaaggacctgcccgccgtcgcggagccgcccgccgacgaggactcgctggccctgctgatctacacctccgggtccaccggcgcccccaagggcgcgatgtacccgcagagcaacgtcggcaagatgtggcgccgcggcagcaagaactggttcggcgagagcgccgcgtcgatcaccctgaatttcatgccgatgagccacgtgatgggccgaagcatcctctacggcacgctgggcaacggcggcaccgcctacttcgccgcccgcagcgacctgtccaccctgctcgaggacctcgagctggtgcggcccaccgagctcaacttcgtcccgcggatctgggagacgctgtacggcgaattccagcgtcaggtcgagcggcggctctccgaggccggggacgccggcgaacgtcgcgccgtcgaggccgaggtgctggccgagcagcgccagtacctgctgggcgggcggttcaccttcgcgatgacgggctcggcgcccatctcgcccgagctgcgcaactgggtcgagtcgctgctcgaaatgcacctgatggacggctacggctccacggaggccggaatggtgttgttcgacggggagattcagcgcccgccggtggtcgactacaagctggtcgacgtgccggacctgggctacttcagcaccgaccggccgcatccgcgcggcgagctgctgctgcgcaccgagaacatgttcccgggctactacaagcgggccgaaaccaccgcgggcgtcttcgacgaggacggctactaccgcaccggcgacgtgttcgccgagatcgccccggaccggctggtctacgtcgaccgccgcaacaacgtgctcaagctggcgcagggcgaattcgtcacgctggccaagctggaggcggtgttcggcaacagcccgctgatccgccagatctacgtctacggcaacagcgcccagccctacctgctggcggtcgtggtgcccaccgaggaggcgctggcctcgggtgaccccgagacgctcaagcccaagatcgccgactcgctgcagcaggtcgccaaggaggccggcctgcagtcctacgaggtgccgcgcgacttcatcatcgagaccaccccgttcagcctggaaaacggtctgctgaccgggatccggaagctggcgtggccgaaactgaagcagcactacggggaacggctggagcagatgtacgccgacctggccgccggacaggccgacgagctggccgagctgcgccgcaacggtgcccaggcgccggtgttgcagaccgtgagccgcgccgcgggcgccatgctgggttcggccgcctccgacctgtcccccgacgcccacttcaccgatctgggcggagactcgttgtcggcgttgacattcggcaacctgctgcgcgagatcttcgacgtcgacgtgccggtgggcgtgatcgtcagcccggccaacgacctggcggccatcgcgagctacatcgaggccgagcggcagggcagcaagcgcccgacgttcgcctcggtgcacggccgggacgcgaccgtggtgcgcgccgccgacctgacgctggacaagttcctcgacgccgacacgctggcctccgcgccgaacctgcccaagccggccaccgaggtgcgcaccgtgctgctgaccggcgccaccggcttcctgggccgctacctggccctggaatggctggagcggatggacatggtggacggcaaggtcatcgccctggtccgggcccgctccgacgaggaggcacgcgcccggctggacaagaccttcgacagcggcgacccgaagctgctcgcgcactaccagcagctggctgccgatcacctggaggtcatcgccggcgacaagggcgaggccaatctgggcctgcgccaagatgtttggcaacggctggccgacacggtcgacgtgatcgtcgaccccgccgcgctggtcaaccacgtgttgccgtacagcgagctgttcgggcccaacgccctgggcaccgcggagctgatccggctggcgctgacgtccaagcagaagccgtacacctacgtgtccaccatcggcgtgggcgaccagatcgagccgggcaagttcgtcgagaacgccgacatccggcagatgagcgccacccgggcgatcaacgacagctacgccaacggctacggcaacagcaagtgggccggcgaggtgctgctgcgcgaggcgcacgacctgtgcgggctgcccgtcgcggtgttccgctgcgacatgatcctggccgacaccacgtatgccgggcagctcaacctgccggacatgttcacccggctgatgctgagcctggtggccaccgggatcgcgcccggctcgttctacgagctcgacgccgacggcaaccggcagcgggcgcactacgacggcctgccggtcgagttcatcgccgcggcgatctcgacgctgggttcgcagatcaccgacagcgacaccggcttccagacctaccacgtgatgaacccctacgatgacggcatcggtctggacgagtacgtcgattggctggtggacgccggctattcgatcgagcggatcgccgactactccgaatggctgcggcggttcgagacctcgctgcgggccctgccggaccggcagcgccagtactcgctgctgccgctgctgcacaactaccgcacgcccgagaagccgatcaacgggtcgatagctcccaccgacgtgttccgggcagcggtgcaggaggcgaaaatcggccccgacaaagacattccgcacgtgtcgccgccggtcatcgtcaagtacatcaccgacctgcagctgctcgggctgctctga

SEQ ID NO: 57 - protein, 1168 aa, Mycobacterium smegmatis; identical to SEQ ID NO: 45

SEQ ID NO: 58 - DNA, 3507 bp, Mycobacterium smegmatis
atgacgatcgaaacgcgcgaagaccgcttcaaccggcgcattgaccacttgttcgaaaccgacccgcagttcgccgccgcccgtcccgacgaggcgatcagcgcggctgccgccgatccggagttgcgccttcctgccgcggtcaaacagattctggccggctatgcggaccgccctgcgctgggcaagcgcgccgtcgagttcgtcaccgacgaagaaggccgcaccaccgcgaagctcctgccccgcttcgacaccatcacctaccgtcagctcgcaggccggatccaggccgtgaccaatgcctggcacaaccatccggtgaatgccggtgaccgcgtggccatcctgggtttcaccagtgtcgactacacgacgatcgacatcgccctgctcgaactcggcgccgtgtccgtaccgctgcagaccagtgcgccggtggcccaactgcagccgatcgtcgccgagaccgagcccaaggtgatcgcgtcgagcgtcgacttcctcgccgacgcagtcgctctcgtcgagtccgggcccgcgccgtcgcgactggtggtgttcgactacagccacgaggtcgacgatcagcgtgaggcgttcgaggcggccaagggcaagctcgcaggcaccggcgtcgtcgtcgagacgatcaccgacgcactggaccgcgggcggtcactcgccgacgcaccgctctacgtgcccgacgaggccgacccgctgacccttctcatctacacctccggcagcaccggcactcccaagggcgcgatgtaccccgagtccaagaccgccacgatgtggcaggccgggtccaaggcccggtgggacgagaccctcggcgtgatgccgtcgatcaccctgaacttcatgcccatgagtcacgtcatggggcgcggcatcctgtgcagcacactcgccagcggcggaaccgcgtacttcgccgcacgcagcgacctgtccaccttcctggaggacctcgccctcgtgcggcccacgcagctcaacttcgttcctcgcatctgggacatgctgttccaggagtaccagagccgcctcgacaaccgccgcgccgagggatccgaggaccgagccgaagccgcagtcctcgaagaggtccgcacccaactgctcggcgggcgattcgtttcggccctgaccggatcggctcccatctcggcggagatgaagagctgggtcgaggacctgctcgacatgcatctgctggagggctacggctccaccgaggccggcgcggtgttcatcgacgggcagatccagcgcccgccggtcatcgactacaagctggtcgacgtgcccgatctcggctacttcgccacggaccggccctacccgcgcggcgaacttctggtcaagtccgagcagatgttccccggctactacaagcgtccggagatcaccgccgagatgttcgacgaggacgggtactaccgcaccggcgacatcgtcgccgagctcgggcccgaccatctcgaatacctcgaccgccgcaacaacgtgctgaaactgtcgcagggcgaattcgtcacggtctccaagctggaggcggtgttcggcgacagccccctggtacgccagatctacgtctacggcaacagcgcgcggtcctatctgctggcggtcgtggtcccgaccgaagaggcactgtcacgttgggacggtgacgaactcaagtcgcgcatcagcgactcactgcaggacgcggcacgagccgccggattgcagtcgtatgagatcccgcgtgacttcctcgtcgagacaacacctttcacgctggagaacggcctgctgaccggtatccgcaagctggcccggccgaaactgaaggcgcactacggcgaacgcctcgaacagctctacaccgacctggccgaggggcaggccaacgagttgcgcgagttgcgccgcaacggagccgaccggcccgtggtcgagaccgtcagccgcgccgcggtcgcactgctcggtgcctccgtcacggatctgcggtccgatgcgcacttcaccgatctgggtggagattcgttgtcggccttgagcttctcgaacctgttgcacgagatcttcgatgtcgacgtgccggtcggcgtcatcgtcagcccggccaccgacctggcaggcgtcgcggcctacatcgagggcgaactgcgcggctccaagcgccccacatacgcgtcggtgcacgggcgcgacgccaccgaggtgcgcgcgcgtgatctcgccctgggcaagttcatcgacgccaagaccctgtccgccgcgccgggtctgccgcgttcgggcaccgagatccgcaccgtgctgctgaccggcgccaccgggttcctgggccgctatctggcgctggaatggctggagcgcatggacctggtggacggcaaggtgatctgcctggtgcgcgcccgcagcgacgacgaggcccgggcgcgtctggacgccacgttcgacaccggggacgcgacactgctcgagcactaccgcgcgctggcagccgatcacctcgaggtgatcgccggtgacaagggcgaggccgatctgggtctcgaccacgacacgtggcagcgactggccgacaccgtcgatctgatcgtcgatccggccgccctggtcaatcacgtcctgccgtacagccagatgttcggacccaatgcgctcggcaccgccgaactcatccggatcgcgctgaccaccacgatcaagccgtacgtgtacgtctcgacgatcggtgtgggacagggcatctcccccgaggcgttcgtcgaggacgccgacatccgcgagatcagcgcgacgcgccgggtcgacgactcgtacgccaacggctacggcaacagcaagtgggccggcgaggtcctgctgcgggaggcgcacgactggtgtggtctgccggtctcggtgttccgctgcgacatgatcctggccgacacgacctactcgggtcagctgaacctgccggacatgttcacccgcctgatgctgagcctcgtggcgaccggcatcgcgcccggttcgttctacgaactcgatgcggacggcaaccggcagcgcgcccactacgacgggctgcccgtggagttcatcgccgaggcgatctccaccatcggctcgcaggtcaccgacggattcgagacgttccacgtgatgaacccgtacgacgacggcatcggcctcgacgagtacgtggactggctgatcgaggccggctaccccgtgcaccgcgtcgacgactacgccacctggctgagccggttcgaaaccgcactgcgggccctgccggaacggcaacgtcaggcctcgctgctgccgctgctgcacaactatcagcagccctcaccgcccgtgtgcggtgccatggcacccaccgaccggttccgtgccgcggtgcaggacgcgaagatcggccccgacaaggacattccgcacgtcacggccgacgtgatcgtcaagtacatcagcaacctgcagatgctcggattgctgtaa

SEQ ID NO: 59 - protein, 1174 aa, Mycobacterium intracellulare
MSTAIHDEHLDRRIEELIANDPQFAAARPDPAITAATEAPGLRLPQIIRTVLDGYADRPALAQRVVEFVTDAKTGRTTAELLPRFETITYGELGERVSALGRAWAGDAVRPGDRVCVLGFNSVDYATIDIALGTIGAVSVPLQTSAAISSLQPIVAETEPSLIASSVNQLPDAVELILAGDHVPGKLVVFDYQPQVDDQREAVEAAAARLADSGVAVEALADVLRRGKDLPAVEPPASDEDSLALLIYTSGSTGAPKGAMYPQSNVGKMWRRGSKNWFGESAASITLNFMPMSHVMGRGILYGTLGNGGTAYFAARSDLSTLLEDLELVRPTEMNFVPRIWETLYGEFQRQVERRLADGDAGPEARETVAAAVLEEQRQYLLGGRFIFAMTGSAPTSPELKAWAESLLQMHLMDGYGSTEAGMVLFDGEIQRPPVIDYKLVDVPDLGYFSTDRPHPRGELLLRTENMFPGYYKRAETTANVFDEDGYYRTGDVFAEIAPDRLVYVDRRNNVLKLAQGEFVTLAKLEAVFGNSPLIRQIYVYGNSSQPYLLAVVVPTEEALADNDLESLKPKIADSLQKVAKETGLQSYEVPRDFIIETTPFTLENGLLTGIRKLAWPKLKAHYGDRLEQMYAELAAGQANELAELRRSGAAAPVAQTVSRAAAALLGATAGDLSADAHFTDLGGDSLSALTFGNLLREIFDVDVPVGVIVSPANDLAGIAAYIEAERQGSKRPTFAAVHGRGATMVHASDLTLDKFLDEATLAAAPSLPKPATEVRTVLLTGATGFLGRYLALDWLERMDMVDGKVIALVRARTDEEARARLDKTFDSGDPKLLAHYQRLAADHLEVIAGDKGEANLGLDPQTWQRLAEEVDVIVDPAALVNHVLPYSELFGPNALGTAELIRIALTSRQKPYTYVSTIGVGDQIQPGEFVENADIRQISATREINDGYANGYGNSKWAGEVLLREAHDLCGLPVTVFRCDMILADTTYAGQLNLPDMFTRLMLSLVATGIAPGSFYELDADGNRQRAHYDGLPVEFIAAAISTLGTQITDSDTGFQTYHVMNPYDDGIGLDEYIDWLIEAGYSIERIADYSEWLRRFETSLRALPDRQRQYSLLPLLHNYQKPEKPINGSMAPTDVFRAAVQEAKIGPDKDIPHVSAPVIVKYITDLELLGLL

SEQ ID NO: 60 - DNA, 3525 bp, Mycobacterium intracellulare
atgtcgactgccattcatgacgaacacctcgaccgtcgcatcgaggaactcatcgccaacgacccccaattcgccgccgcccgaccggacccggccatcaccgccgccaccgaagcgcccgggctgcggctgccgcagatcatccggaccgtgctcgacggctacgccgaccggcctgccctggcgcagcgcgtcgtggagttcgtcaccgacgccaagaccgggcggacgacggccgagctgctcccccgtttcgagaccatcacgtatggcgaactcggcgaacgggtttcggccctcggccgtgcctgggccggcgacgcggtgcgccccggcgaccgcgtctgcgtgctcggcttcaacagcgttgactacgccaccatcgacatcgcgctgggcaccatcggggccgtgtcggtgccgctgcagaccagcgcggcgatctcctcgttgcagccgatcgtcgccgagaccgagcccagcctgatcgcctcgagcgtcaaccagctgcccgacgcggtggagctgatcctggccggcgaccacgtgcccggcaagctcgtcgtgttcgactaccagccccaggtcgacgaccagcgcgaggccgtggaggccgccgccgcgcggttggccgactccggcgtcgcggtcgaggctctcgccgacgtgctgcggcgcggcaaggacctgccggccgtcgagccgccggcgagcgacgaggactcgctggccctgctgatctacacctccggcagcaccggcgcgcccaagggcgcgatgtacccgcagagcaacgtcggcaagatgtggcggcgcgggagcaagaactggttcggggaaagcgccgcgtcgatcaccctcaacttcatgccgatgagccacgtcatggggcgcggaatcctctacggcacgctgggcaacggcggcaccgcgtacttcgccgcccgcagcgacctgtccaccctgctcgaggacctcgagttggtgcggcccaccgagatgaacttcgtcccccgcatctgggagacgctgtacggcgaattccagcgccaggtcgagcggcggctggccgacggcgatgcgggcccggaggcccgcgagactgtggcggctgcggtgttggaagaacagcgccagtacctgctgggcgggcggttcatcttcgcgatgacgggctcggcacccacctcgccggagctcaaggcgtgggccgagtcgctcctgcagatgcacctgatggacggctacggctccaccgaggccggaatggtgttgttcgacggggagattcagcgtccgccggttattgattacaagctggtcgacgttccggatctgggctatttcagcaccgaccgtccgcatccgcgcggtgagttgttgctgcggaccgagaacatgttcccgggttattacaagcgggccgagaccaccgcgaacgtgttcgacgaggacggttattaccgcaccggtgacgtgttcgccgagatcgcgccggaccggctggtgtatgtcgatcgccgcaacaacgtgctcaagttggcccagggcgagttcgtgacgctggccaagctggaggcggtgttcggcaacagcccgctgatccgccagatctacgtttacggcaacagctcccagccctacctgctggccgtggtggtgccgaccgaggaagcgttggcggacaacgatcttgagtcgctcaagccgaagatcgccgactcgctgcagaaggtcgccaaggagaccggcctgcagtcctacgaggtgccgcgcgacttcatcatcgagaccacgccgttcaccctggaaaacggcctgctgaccgggatccgcaagctggcgtggcccaagctcaaggcgcactacggggatcggctcgagcagatgtatgccgagctggccgcgggacaggccaacgagttggccgaactgcgccgcagcggcgcggcggcgccggtggcccagaccgtgagccgggccgcggccgccctgctgggtgcgacggccggggatctgtccgcagatgcccacttcaccgatcttggtggagactcgttgtcggcgttgaccttcggcaacctgctgcgcgagatcttcgatgtcgacgtgccggtgggggtgatcgtcagcccggccaacgacctggcggggatcgccgcctacatcgaggccgagcggcagggctccaagcgcccgacgttcgccgccgtgcacggtcgcggtgcgaccatggtgcacgccagtgacctcacgctggacaagttcctcgacgaggcgaccctggccgccgcgcccagcctgcccaagccggccaccgaggtgcgcaccgtgctgttgaccggcgcgaccggctttttgggccgctacctggcgctggactggctcgagcggatggacatggtcgacggcaaggtcatcgccctggtgcgggcccgcaccgatgaggaggcgcgcgcccggctggacaagaccttcgacagcggcgaccccaaactgctggcgcactaccagcggctggccgccgaccacctcgaggtcatcgccggcgacaagggtgaggccaacctcggcctggacccccagacctggcagcgactggccgaggaggtcgacgtcatcgtcgaccccgccgcgctggtcaaccacgtgctgccctacagcgagctgttcggccccaacgccctgggcaccgcggagctgatccggatcgcgctgacctccaggcaaaagccctacacctacgtgtcgacgatcggggtgggcgatcagatccagccaggtgagttcgtcgagaacgccgacatccgccagatcagcgccacccgcgagatcaacgacggctacgccaacggctacggcaacagcaagtgggccggcgaggtgttgctgcgcgaggcccacgacctgtgcggcctgcccgtcacggtgttccgctgcgacatgatcctggccgacaccacctatgccgggcagctcaacctgcccgacatgttcacccggctgatgctgagcctggtcgccaccggtatcgcgcccgggtcgttctacgaactggacgccgacggcaaccgccagcgggcacactacgacggtttgccggtcgagttcatcgccgcggcgatctcgacgctggggacccaaatcaccgacagcgacacgggctttcagacctaccacgtgatgaacccctacgacgacggcatcgggctggatgagtacatcgattggctgatcgaggccgggtattcgatcgagcggatcgccgattactccgagtggctgcggcgcttcgagacctcgctgcgggccctgcccgatcggcagcgtcagtactcgctgctgccgctgctgcacaactaccagaagccggaaaagccgatcaacggctcgatggcgcccaccgacgtgttccgtgccgcggtgcaggaagcgaaaatcggccccgacaaagacatcccgcacgtctcggcgccggtgatcgtcaagtacatcaccgacctggagttgctcggactcctctga

SEQ ID NO: 61 - protein, 1173 aa, Mycobacterium smegmatis; identical to SEQ ID NO: 47

SEQ ID NO: 62 - DNA, 3522 bp, Mycobacterium smegmatis; identical to SEQ ID NO: 48

SEQ ID NO: 63 - protein, 1174 aa, Mycobacterium kansasii
MSTTTRDERLERRIDTLIHDDAQFAAAKPDPAIAAALEKPGLSLPEIIQTALQGYADRPALGQRAVEFVTDTQTGRTSVRLLTRFETITYRQLGDRVGALARALTHDSVHAGDRVCVLGFNSLDYTTIDMALAKVGAVSVPLQTSAAVTQLQPIVAETEPTMMAASVNQLSDAVDVLLSGHLPAKLVVFDYHPEVDDQREALDTARERLADTAVVVQTLKDVLDHGATLAAGSVAEPLAASGDNDSLALLIYTSGSTGAPKGAMYRQSNVGKMWRRSSKNWFGPTAASITLNFMPMSHIMGRGVLYGTLGNGGTAYFAARSDLSTLLEDLRLVRPTELNFVPRIWETLYGEYQRAVDQRSVDPGEPAAREAVEAQVMAEQRQDLLGGRYIFAMTGSAPMSPELRNWVEALLEIPLLDGYGSTEAGMVMFDGEIQRPPVIDYKLVDVPDLGYFSTDQPYPRGELLLKTENMFPGYYKRPEVTASVFDADGYYRTGDVVAEVAPDRLVYVDRRNNVLKLAQGEFVTVAKLEAVFGNSPLVRQIYVYGNSAHPYLLAVVVPTEEASAGTDIAALKPLIADSLQTVAKEAGLQSYEVPRDFLIETTPFTLENGLLTGIRKLAWPKLRQHYGERLEQLYTELAASQANELSELRRSGAHAPVLETVSRAAGALLGAASTALSPDAHFTDLGGDSLSALTFGNLLREIFDVDVPVGVIVSPASDLAAIAAYIEGERQGSKRPTFAVIHGRDALEVHASDLTLDKFIDASTLAAAPVLPPPSAAVRTVLLTGATGFLGRYLALDWLERMDLVDGKVIALVRAKSDDDARARLDKTFDSGDPELLTHYRRLATDHLEVIAGDKGEANLGLDQLTWQRLADTVDLIVDPAALVNHVLPYSELFGPNALGTAELIRIALTGKLKPYTYVSTIGVGDQIEPGKFTEDADIRHISATRKINDSYANGYGNSKWAGEVLLREAHDLCGLPVAVFRCDMILADTTWAGQLNVPDMFTRMMLSLVATGIAPGSFYELDADGNRQRAHYDGLPVEFIAEAIATLGARDGKGFQTYHVMNPYDDGIGMDRFVDWLVDAGCAIHRIDDYGDWLRRFETALRGLPEKQRHASLLPLLHNYQKPAPPLRGSMAPTDRFRAAVQDAKVGPDKDIPHISPQIIAKYLSDLRLLGLL

SEQ ID NO: 64 - DNA, 3525 bp, Mycobacterium kansasii
atgtcgactaccactcgtgacgagcgcctcgagcgccgcatcgacaccctgatccacgacgacgcacagttcgccgccgccaagccggacccggcaatcgccgccgccctggaaaagcccggcctgagcctgccagagatcatccagaccgcgctgcagggctacgccgaccggccggctctcgggcagcgcgccgtcgagttcgtcacggacacccagaccggccgcacctcggtgcggctgctgacccgcttcgagaccatcacctaccgtcagctcggcgaccgggtcggtgcgctggcgcgcgccctgacccacgactcggtgcacgccggcgaccgggtctgcgtgctgggcttcaacagcctcgactacaccaccatcgacatggcgctggcgaaggtcggcgcggtgtcggtgccgctgcagaccagtgcggcggttacccagctgcagccgatcgtggccgagaccgagcccaccatgatggcggccagtgtgaatcagctgtcggatgccgtggacgtgctgttgagcggccacctgccggccaagctggtggtgttcgactaccaccccgaggtggacgaccagcgcgaggcgctcgacacggcccgggagcggttggcggacacagcggtggttgtccagaccctcaaggacgtcctggaccacggcgcaacgctggcggcggggtcggttgccgagccgctcgcggcgtcgggcgacaacgactcgctggcgctgctgatctacacctccggcagcaccggcgcacccaaaggtgcgatgtatcgacagagcaacgtcggcaagatgtggcgccggtcgagcaagaactggttcgggcccaccgcggcgtcgatcaccctcaacttcatgccgatgagccacatcatgggacgtggagtcctctacggcacgctcggcaacggcggcaccgcgtacttcgcggccaggagcgacctctcgacgctgctggaagacttgcggctggtgcggcccaccgagttgaacttcgtgccgcggatctgggagaccttgtacggcgaataccagcgcgcggtcgaccagcggtcggtcgatcccggtgaacccgccgcccgcgaagccgtcgaagcccaggtcatggccgagcagcgccaggacctgctgggtgggcgctatatcttcgcgatgacgggctcggcgcccatgtccccggagctgcggaactgggtggaagcgctgctggagatcccactgctcgacggttacggctccaccgaggccgggatggtcatgttcgacggtgaaattcagcgcccgccggtgatcgactacaagctggtcgacgtgcccgatctgggctacttcagcaccgaccagccgtatccgcggggcgagttgctgctcaagaccgagaacatgttcccaggctattacaagcggccggaggttacggccagcgtgttcgacgcggacggctactaccggaccggagacgtcgtggccgaggtcgctccggaccggctggtgtacgtggaccgccgcaacaacgtgctgaagcttgcccagggcgagttcgtgaccgtcgccaagctggaggcggtgttcggcaacagcccgctggtgcgccagatctacgtctacggcaacagcgcgcatccctacctgttggccgtggtggtgccaacggaagaagcgtcggcgggcactgacatagcggccttgaagccgctgatcgccgactcgctgcagaccgtcgccaaagaggccggcctgcagtcctacgaggtgccgcgcgacttcctcatcgagacaacaccattcacgctggagaacggtctgctcaccggtatccgcaagctggcgtggccgaagctgaggcagcattacggcgaacggctggagcagctctacacggagctggccgcgagccaggccaacgagttgagcgagctgcggcgcagcggggcccatgcgccggtgctggaaacggtgagccgggcggcgggcgcgctgctgggggcggcgagcaccgccttgtcacccgacgcgcacttcaccgatctgggtggagactcgttgtcggcgttgacattcggcaacctgctgcgggagatcttcgacgttgacgtaccggtgggtgtgatcgtcagcccggccagcgacctggcggcgatcgccgcttacatcgagggcgagcggcagggcagcaagcgacccacgttcgccgtgattcacggtcgggacgcgctagaggtgcatgcgagtgacctcaccctggacaagttcatcgacgcatccaccctggcagccgcaccggtactgccgcctccgagcgccgcggtgcgcaccgtcctgttgaccggcgcgaccggctttttgggccgctacctggcgctggactggctggagcgcatggacctggtcgacggcaaggtgatcgccctggtgcgggcgaagtcggacgacgatgcccgggcacgcctggacaagacgttcgacagcggagaccccgagctgctgacccactaccggcggctggcgaccgaccacttggaggtcatcgccggcgacaagggcgaggccaacctcgggctggatcagctgacctggcagcggctggccgacaccgtcgacctgatcgtcgacccggccgcgttggtcaaccacgtgctgccctacagcgagctgttcggccccaacgcgctgggcaccgccgaattgatccggatagcgctgaccggcaagctcaagccctacacctacgtctcgaccatcggggtgggcgaccagatcgagccgggcaagttcaccgaggacgccgacatccggcacatcagcgcgacccggaagatcaacgacagttacgccaacggctacggcaacagcaagtgggccggcgaggtgctactgcgcgaggcccacgacctgtgcgggctgccggtcgcggtgttccgctgcgacatgatcctggccgacaccacgtgggcgggtcagctcaacgtgccggacatgttcacccggatgatgctgagcctggtggccaccggcattgcacccggttcgttctacgagctggacgccgacggcaaccggcagcgtgcccactacgacggcttgccggtcgagttcatcgccgaggcgatcgcgacgctgggcgcccgggacgggaagggtttccagacctaccacgtgatgaacccctacgacgacggcatcgggatggaccggttcgtcgactggctcgtcgacgccggatgcgccatccaccgcatcgacgactacggcgactggctgcgacgattcgagaccgcgctgcgcggcctgcccgaaaagcagcgtcacgcgtcactactgccgttgctgcacaactaccagaagccggcgccgccgctgcgcgggtcgatggctccgaccgaccggttccgggcggccgtgcaggacgcgaaagtgggcccggacaaggacatcccgcacatctcgccgcagatcatcgcgaagtacctcagtgatctgcgcttgctcgggctcctctga

SEQ ID NO: 65 - protein, 1168 aa, Mycobacterium bovis
MSINDQRLTRRVEDLYASDAQFAAASPNEAITQAIDQPGVALPQLIRMVMEGYADRPALGQRALRFVTDPDSGRTMVELLPRFETITYRELWARAGTLATALSAEPAIRPGDRVCVLGFNSVDYTTIDIALIRLGAVSVPLQTSAPVTGLRPIVTETEPTMIATSIDNLGDAVEVLAGHAPARLVVFDYHGKVDTHREAVEAARARLAGSVTIDTLAELIERGRALPATPIADSADDALALLIYTSGSTGAPKGAMYRESQVMSFWRKSSGWFEPSGYPSITLNFMPMSHVGGRQVLYGTLSNGGTAYYVAKSDLSTLFEDLALVRPTELCFVPRIWDMVFAEFHSEVDRRLVDGADRAALEAQVKAELRENVLGGRFVMALTGSAPISAEMTAWVESLLADVHLVEGYGSTEAGMVLNDGMVRRPAVIDYKLVDVPELGYFGTDQPYPRGELLVKTQTMFPGYYQRPDVTAEVFDPDGFYRTGDIMAKVGPDQFVYLDRRNNVLKLSQGEFIAVSKLEAVFGDSPLVRQIFIYGNSARAYPLAVVVPSGDALSRHGIENLKPVISESLQEVARAAGLQSYEIPRDFIIETTPFTLENGLLTGIRKLARPQLKKFYGERLERLYTELADSQSNELRELRQSGPDAPVLPTLCRAAAALLGSTAADVRPDAHFADLGGDSLSALSLANLLHEIFGVDVPVGVIVSPASDLRALADHIEAARTGVRRPSFASIHGRSATEVHASDLTLDKFIDAATLAAAPNLPAPSAQVRTVLLTGATGFLGRYLALEWLDRMDLVNGKLICLVRARSDEEAQARLDATFDSGDPYLVRHYRELGAGRLEVLAGDKGEADLGLDRVTWQRLADTVDLIVDPAALVNHVLPYSQLFGPNAAGTAELLRLALTGKRKPYIYTSTIAVGEQIPPEAFTEDADIRAISPTRRIDDSYANGYANSKWAGEVLLREAHEQCGLPVTVFRCDMILADTSYTGQLNLPDMFTRLMLSLAATGIAPGSFYELDAHGNRQRAHYDGLPVEFVAEAICTLGTHSPDRFVTYHVMNPYDDGIGLDEFVDWLNSPTSGSGCTIQRIADYGEWLQRFETSLRALPDRQRHASLLPLLHNYREPAKPICGSIAPTDQFRAAVQEAKIGPDKDIPHLTAAIIAKYISNLRLLGLL

SEQ ID NO: 66 - DNA, 3507 bp, Mycobacterium bovis
atgtcgatcaacgatcagcgactgacacgccgcgtcgaggacctatacgccagcgacgcccagttcgccgccgccagtcccaacgaggcgatcacccaggcgatcgaccagcccggggtcgcgcttccacagctcatccgtatggtcatggagggctacgccgatcggccggcactcggccagcgtgcgctccgcttcgtcaccgaccccgacagcggccgcaccatggtcgagctactgccgcggttcgagaccatcacctaccgcgaactgtgggcccgcgccggcacattggccaccgcgttgagcgctgagcccgcgatccggccgggcgaccgggtttgcgtgctgggcttcaacagcgtcgactacacaaccatcgacatcgcgctgatccggttgggcgccgtgtcggttccactgcagaccagtgcgccggtcaccgggttgcgcccgatcgtcaccgagaccgagccgacgatgatcgccaccagcatcgacaatcttggcgacgccgtcgaagtgctggccggtcacgccccggcccggctggtcgtattcgattaccacggcaaggttgacacccaccgcgaggccgtcgaagccgcccgagctcggttggccggctcggtgaccatcgacacacttgccgaactgatcgaacgcggcagggcgctgccggccacacccattgccgacagcgccgacgacgcgctggcgctgctgatttacacctcgggtagtaccggcgcacccaaaggcgccatgtatcgcgagagccaggtgatgagcttctggcgcaagtcgagtggctggttcgagccgagcggttacccctcgatcacgctgaacttcatgccgatgagccacgtcgggggccgtcaggtgctctacgggacgctttccaacggcggtaccgcctactacgtcgccaagagcgacctgtcgacgctgttcgaggacctcgccctggtgcggcccacagaattgtgcttcgtgccgcgcatctgggacatggtgttcgcagagttccacagcgaggtcgaccgccgcttggtggacggcgccgatcgagcggcgctggaagcgcaggtgaaggccgagctgcgggagaacgtgctcggcggacggtttgtcatggcgctgaccggttccgcgccgatctccgctgagatgacggcgtgggtcgagtccctgctggccgacgtgcatttggtggagggttacggctccaccgaggccgggatggtcctgaacgacggcatggtgcggcgccccgcggtgatcgactacaagctggtcgacgtgcccgagctgggctacttcggcaccgatcagccctacccccggggcgagctgctggtcaagacgcaaaccatgttccccggctactaccagcgcccggatgtcaccgccgaggtgttcgaccccgacggcttctaccggaccggggacatcatggccaaagtaggccccgaccagttcgtctacctcgaccgccgcaacaacgtgctaaagctctcccagggcgagttcatcgccgtgtcgaagctcgaggcggtgttcggcgacagcccgctggtccgacagatcttcatctacggcaacagtgcccgggcctacccgctggcggtggttgtcccgtccggggacgcgctttctcgccatggcatcgagaatctcaagcccgtgatcagcgagtccctgcaggaggtagcgagggcggccggcctgcaatcctacgagattccacgcgacttcatcatcgaaaccacgccgttcaccctggagaacggcctgctcaccggcatccgcaagctggcacgcccgcagttgaagaagttctatggcgaacgtctcgagcggctctataccgagctggccgatagccaatccaacgagctgcgcgagctgcggcaaagcggtcccgatgcgccggtgcttccgacgctgtgccgtgccgcggctgcgttgctgggctctaccgctgcggatgtgcggccggacgcgcacttcgccgacctgggtggtgactcgctctcggcgctgtcgttggccaacctgctgcacgagatcttcggcgtcgacgtgccggtgggtgtcattgtcagcccggcaagcgacctgcgggccctggccgaccacatcgaagcagcgcgcaccggcgtcaggcgacccagcttcgcctcgatacacggtcgctccgcgacggaagtgcacgccagcgacctcacgctggacaagttcatcgacgctgccaccctggccgcagccccgaacctgccggcaccgagcgcccaagtgcgcaccgtactgctgaccggcgccaccggctttttgggtcgctacctggcgctggaatggctcgaccgcatggacctggtcaacggcaagctgatctgcctggtccgcgccagatccgacgaggaagcacaagcccggctggacgcgacgttcgatagcggcgacccgtatttggtgcggcactaccgcgaattgggcgccggccgcctcgaggtgctcgccggcgacaagggcgaggccgacctgggcctggaccgggtcacctggcagcggctagccgacacggtggacctgatcgtggaccccgcggccctggtcaaccacgtgctgccgtatagccagctgttcggcccaaacgcggcgggcaccgccgagttgcttcggctggcgctgaccggcaagcgcaagccatacatctacacctcgacgatcgccgtgggcgagcagatcccgccggaggcgttcaccgaggacgccgacatccgggccatcagcccgacccgcaggatcgacgacagctacgccaacggctacgcgaacagcaagtgggccggcgaggtgctgctgcgcgaagctcacgagcagtgcggcctgccggtgacggtcttccgctgcgacatgatcctggccgacaccagctataccggtcagctcaacctgccggacatgttcacccggctgatgctgagcctggccgctaccggcatcgcacccggttcgttctatgagctggatgcgcacggcaatcggcaacgcgcccactatgacggcttgccggtcgaattcgtcgcagaagccatttgcacccttgggacacatagcccggaccgttttgtcacctaccacgtgatgaacccctacgacgacggcatcgggctggacgagttcgtcgactggctcaactccccaactagcgggtccggttgcacgatccagcggatcgccgactacggcgagtggctgcagcggttcgagacttcgctgcgtgccttgccggatcgccagcgccacgcctcgctgctgcccttgctgcacaactaccgagagcctgcaaagccgatatgcgggtcaatcgcgcccaccgaccagttccgcgctgccgtccaagaagcgaaaatcggtccggacaaagacattccgcacctcacggcggcgatcatcgcgaagtacatcagcaacctgcgactgctcgggctgctgtga

SEQ ID NO: 67 - protein, 1162 aa, Mycobacterium intracellulare
MAATDEQFRNAQPDLSLQQAARQPGLRLPQILELFVEGYADRPAVGWRARTLSTDPATGRTTTRLLPRFDTMTYRELWADVRAIAAAWRHDAANPVSPGDFVATVGFASAEYLTLDLVCGYLGLVAVPLQHNTTPSRLRPIVDEVEPSILAAGVGYLDLAVEAASGSSSLRRLVVFDYQPEVDEQREALQRAQATLAAAGAAVTIETLDEIIERGRALPPEPMYTGDTDQRLAMIMYTSGSTGLPKGAMYTEQMLAKVWTNELMPDFADTPVFNVNFMPLNHLGGRIPLSTAFQAGGTSYFVPESDLSTLFDDWNLVRPTEMGLVPRVAEMLYQRYQSAVDRLVASGADAGSAEARARAELREHVLGGRIVTAFCGTAPLAAEMRAFVETCLDVHVLDGYGLTEVGMVTKDGRMTRPPVLDYKLIDVPELGYFHTDKPYPRGELLVKSLTATPGYFKRPDVTANAFDPDGYYRTGDVMAELEPDRLAYVDRRNNVLKLAQGEFVAVARLEAVFASAPLIRQIFVYGNSERPYLLAVVVPTADAAERFTGDPEGLKAAVAESLRQSAQLAELQSYEVPVDFVVETEPFSEDNGLLSGVGKLLRPKLKERYADRLEQLYAELAENRVTELRALREGADKHPVVFTLTRAAEALLGVAGGPPAPDALFIELGGDSLSALTFSNLLRDIFDVDVPVGMITGPATDLGQLAEYVESERKSGSRRPTFATVHGRGAAEVRAAELTLDKFIDATTLAAAPNLPRATGTPHTVLLTGANGYLGRFLALEWLERLAETGGKLVSIVRATDTAAAVKRLEAVFDSGDPQLLERFRTLAAEHLEVIVGDIGEPNLGLDQATWQRLAQSVDLIVHPAALVNHVLPYDQLFGPNVVGTAELIRLAITTRIKPVTYLSTVAVAMTVDPGEFAEDGDIRAVSAVRPIDDSYANGYANSKWAGEVLLREAHDLCGLPVAVFRSDMILAHSRYAGQLNVPDAFTRLMFSLLTTGIAPTTFYRTDEHGNRAVAHYDGLPADFVAEAVTTLGEQMAAEESGGYRSYDVMNPHDDGVSLDVFVDWLIAAGHDIRRIEDYDEWLGRFTTALRALPDKQRQHSVLPLLDAYREPATPLRGAPAPTDVFRHAVRTAKIGADEDIPHLSAALIDKYVADLRLLGLV

SEQ ID NO: 68 - DNA, 3489 bp, Mycobacterium intracellulare
ttggccgcgaccgacgaacagttccgcaacgcccaacccgatctgtcgctgcagcaggcggcgcgccaaccgggcctgcgcctgccccagattctggagctgttcgtcgagggctacgccgatcggcccgcggtgggctggcgggccaggacactgagcaccgaccccgcgaccgggcgtaccaccacgcgactgctcccccgcttcgacaccatgacctaccgcgagctgtgggccgatgtgcgcgcgatcgccgccgcgtggcggcacgacgccgcgaaccccgtgtcgcccggggacttcgtcgcgacggtcggtttcgccagcgccgaatatctgaccctcgacctggtctgcggctacctcgggctggttgccgttccgctgcaacacaatacgaccccctcacggctgcgaccgatcgtcgacgaggtcgagccgtcgatactggccgccggcgtcggttatctcgacctcgcggtcgaggcggcgtcgggcagctcgtcgttgcggcggctcgtggtcttcgattaccagcccgaggtcgacgagcaacgcgaggcgctgcagcgcgcccaggcgacgctggcggccgccggcgcggcggtgaccatcgagaccctcgacgaaatcatcgaacgcggacgcgccctgccgcccgagcccatgtacaccggtgataccgatcagcggctggcgatgatcatgtacacctcgggcagcaccgggttacccaagggcgccatgtacaccgagcagatgctggccaaggtgtggaccaacgagctgatgcccgacttcgcggacacacccgtgttcaacgtcaacttcatgccgctgaatcacctcggtggccggataccgctgtcgaccgcgttccaggccggcggcaccagctatttcgtgccggaaagcgacctgtccacgttgttcgacgactggaacctggtgcgccccaccgagatgggcctggtaccccgggtggcggaaatgctctaccagcgctaccagagcgccgtcgaccgactcgtggcttcgggcgccgacgccggctccgccgaggcccgggcgcgggccgagctgcgtgagcatgtcctcggcgggcgcatcgtgaccgccttctgcgggacggcgccgctggccgcggagatgcgggccttcgtcgaaacctgtttggacgtccacgttctcgacggctacgggctgaccgaggtcggcatggtgaccaaggacgggcgcatgacccgtcccccggtgctcgactacaagctcatcgacgttcccgaactcggctatttccacaccgacaagccttatccgcgtggcgaattgctggtgaagtcgctgaccgcgacgccgggctacttcaaacgaccggacgtcaccgccaacgcgttcgatcccgacggctactaccggaccggcgatgtgatggccgagctcgagccggaccggctggcctacgtcgaccgccgcaacaacgtgttgaagttggcgcagggcgagttcgtcgccgtcgcccgcctggaggccgtcttcgccagcgcgccgctgatccgccagatcttcgtatacggcaacagcgaacgcccctatctgctggccgtcgtcgtgccgacggccgacgccgcggagcgattcaccggagatcccgagggcctcaaggccgccgtcgccgaatccctgcgccagtcggcgcaactcgccgaactgcagtcctacgaggtgcccgtcgacttcgtcgtcgagaccgagccgttcagcgaggacaacggcctgctctcgggcgtgggcaagctgctgcggccgaagctcaaggagcgctacgccgaccggctcgaacagctctacgccgagctggccgaaaaccgcgtgaccgagttgcgtgcgctgcgcgagggggcggacaaacaccccgtcgtcttcaccctcacccgggccgccgaggcgctactgggtgtggccggcggcccgcccgcccccgacgcactgttcatcgaactcggcggcgattccctgtcggcgctgaccttctccaacctgctgcgcgacatcttcgacgtcgacgtgccggtgggaatgatcaccgggcccgcgaccgacctgggccagctcgcggaatacgttgaatccgaacgcaaatcgggatcacgccggcccacattcgcgacggtgcacggacgcggcgccgccgaggtccgcgccgcggagctcaccctcgacaagttcatcgacgcgacgaccttggccgccgcaccgaacctgccgcgcgcgaccggcacaccccacacggtcctgctgaccggcgccaacggctacctcggccgcttcctggccctcgaatggctcgagcgcctcgccgagaccggcgggaagctcgtctccatcgtccgcgcgacggacaccgcggcggccgtcaaacggctggaggccgttttcgacagcggggatccgcagttgctggagcggttccggacgctggccgccgagcacctggaagtcatcgtcggcgacatcggtgagcccaatctcggcctggaccaagcgacttggcagcgcctggcccagagcgtggatctgatcgtccacccggccgcgttggtcaaccacgtgctgccgtacgaccaactgttcggtccgaacgtcgtcggcaccgccgagttgatccgcctggcgatcacgacgcgcatcaagcccgtcacctatctgtcgaccgtcgccgtggcgatgacggtcgatcccggcgagttcgccgaagacggcgacatccgcgcggtcagcgcggtacgcccgatcgacgacagctacgcgaacgggtacgcgaacagcaagtgggccggtgaggtgttgctgcgtgaggcgcacgacctgtgcgggttgccggtcgccgtcttccgctccgacatgatcctcgcgcacagccggtatgccgggcagctgaacgtgccagatgccttcacccgcttgatgttcagcctgctgaccaccggcatcgcgccgaccacgttctaccggaccgacgaacacggaaaccgagccgtggcccactacgacgggctgcccgccgacttcgtggccgaagcggtcaccacgctcggcgaacagatggcggccgaggaatccggcgggtaccgctcctatgacgtgatgaacccacacgacgacggcgtctccctggacgtgttcgtcgactggctgatcgccgccggacacgacatccggcgcatcgaggactatgacgaatggctgggccgcttcaccacggcgcttcgcgcgttaccggacaagcagcgccagcattcggtgttgccgctgctggacgcctaccgggaacccgcgacgccactgcggggagcgccggcccccaccgacgtcttccgccacgcggtgcggacggccaaaatcggtgcggacgaggacattccgcacctgtcggcggcgttgatcgacaagtacgtcgccgacctacgcctgctgggcttggtgtag

SEQ ID NO: 69 - protein, 1168 aa, Mycobacterium tuberculosis; identical to SEQ ID NO: 43

SEQ ID NO: 70 - DNA, 3507 bp, Mycobacterium tuberculosis; identical to SEQ ID NO: 44

SEQ ID NO: 71 - protein, 1162 aa, Mycobacterium vanbaalenii
MSTDTREDRLARRIADLYATDPQFAAAAPDDAISHAIDQPGTHLPVIVQTVLDGYAERPALGQRAVRFVTDPATGRTTTELLPRFETITYAELSRRIHAVTAALTDVHPGDRVAVLGFTSIDYTTVDMALAMLGAVAVPLQTSAPATTVRPIVAETEPVVIASSVDALTDAVGLALDAPTVTRLVVFDHRAGVDDHRDALISASDRLRAANSPIEVETITDIVARGSKLPVRAQFSADGDALSLLIYTSGSTGAPKGAMYPQHLVANSWRRLARSFWGDLGVFPAITLNFMPMSHVMGRGLLYGTLDAGGTAYFAARSDLSTFLEDLALVRPTQLSFVPRIWDTIHAEVSQELERRPSDATEVIADLRRSLLGGRYVTAMTGSAPLSPEMRAFVENLLDVHLIDGYGSTEAGAVFVDGRVQRPPVIDYKLVDVADLGYFSTDRPHPRGELLVKSETLFPGYYKRPDVTAEMFDEDGYYRTGDIVAETGADQLTYLDRRNNVLKLSQGEFVTVSRLEAVFGNSPLVRQIYVYGNSARPYLLAVVVPTEAALAGADAKAAVAESLQDVAKATGLQSYEIPRDFLLETTPFTLENGLLTGIRKLARPRLRERYGEQLEALYTMLSEEQADELRELRRSGGERPALETVGRAAGALLGTTAGELEPSAHFTDLGGDSLSALTFANLLRDIFDVDVPVGVIVSPATDLQALADYVESARRHGSVRPTFESVHGHSGRPGTEVHARDLTLDEFVDAATLAHAPTLPGPRAEVRTVLLTGATGFLGRYLALEWLERMALVGGKLICLVRAKDDAAARVRLDSTFDSGDPELLRHYRRLAADHLEVIAGDKADADLGLDARTWQRLADTVDLIVDPAALVNHVLPYRQLFAPNVLGTAELLRIALTTRMKPFVYVSTIGVGAGIEPARFTEDADIRQISATRRIDDSYANGYGNSKWAGEVLLREAHDLCGLPVSVFRCDMILADTTYAGQLNLPDMFTRLIFSLVATGVAPESFYHLATDGTRQRAHYDGLPVEFIAEAISTLGSDVASGFRTYHVMNPHDDGIGLDEYVDWLIDAGHPIRRVGDYPTWLQRFTVAITALPERQRQASLLPLLHNYQHPETPIRGSIAPTDRFREAVQDAKIGPDKDIPHVTPQIVIKYVTDLQRLGLL

SEQ ID NO: 72 - DNA, 3489 bp, Mycobacterium vanbaalenii
atgtctactgatacccgcgaagaccgccttgcccgccgcatcgccgatctgtacgccaccgacccgcagtttgccgccgcagcacccgacgacgccatctcccacgccatcgatcaaccagggacgcacctgcccgtcatcgtgcagaccgtcctcgacggatacgccgagcggcccgcgctcggacagcgcgcggtccgtttcgtcaccgaccccgccacgggcagaaccaccaccgagctgctcccccgcttcgagaccatcacctacgccgagttgtcacgccgcatccacgcggtcaccgccgcgctgaccgatgtgcatccgggcgaccgcgtggcggtgctgggcttcaccagcatcgactacaccaccgtcgacatggctttggcgatgctgggcgcggtggcggtaccacttcagaccagcgcgccggccaccaccgtccggccgatcgtcgccgagaccgaaccggtggtcatcgcatcgtcggtcgatgccctcaccgacgccgtcggcctggctctcgacgctcccaccgtgacccgccttgtggtcttcgatcatcgcgccggggtcgacgatcatcgcgacgccctcatctccgcgagcgaccggttgcgcgccgccaactcgccgatcgaggtcgagaccattaccgacatcgtcgctcggggttcgaaactgcctgtacgcgcgcaattctcggccgacggtgacgcgctgagcctgctgatctacacctccggcagcaccggcgcacccaagggtgcgatgtacccccaacacctggtcgccaactcatggcggcggttggcccggtccttctggggcgacctgggggtcttcccggcaatcacgctgaacttcatgccgatgagccacgtgatgggccgcggactgctctacggcacgctggacgccggcggcaccgcgtatttcgcggccaggagcgatctgtcgacgttcctggaggatctcgccctggtgcgcccgacgcagctgagcttcgtgccgcggatctgggacaccatccacgccgaggtgtcccaggaactcgagcgccggccgtcggatgcgaccgaggtgatcgccgatctgcggcggagcctgctgggcggccgctacgtcacggcgatgacgggctccgcgccgctgtcaccggagatgcgggccttcgtcgagaacctgctcgacgtgcacctgatcgacgggtacggctcgaccgaggccggcgcggtgttcgtcgacggccgggtccaacgcccgccggtcatcgattacaagctcgtcgacgtcgccgacctcggctacttctccaccgaccgcccccatccgcgcggcgagcttctcgtcaaatccgagacgctgtttcccggctactacaaacgccccgacgtcaccgccgagatgttcgacgaagacggctactaccgcaccggcgacatcgtcgccgagaccggggccgaccagctgacctatctggaccgccgcaacaacgtcctcaaactgtcgcagggcgaattcgtcaccgtctcccgactggaggcagtgttcggcaacagcccgctggtccgccagatctacgtctacggcaacagcgcccgcccctacctgctggctgtggtcgtgcccaccgaagccgcgctggccggtgctgacgccaaagccgctgtggccgagtcacttcaggatgtcgccaaggcgaccgggctgcagtcctacgagatcccccgcgatttccttctcgagacgacgccgttcacgctggagaacggcttgctgaccggcatccgaaaactggcccgccccagactcagagagcgttacggcgaacagctcgaggccctctacaccatgctgtccgaagagcaggccgacgagctgcgggagctgcgccgctccggcggagagcgtccggcgctggaaaccgtcggacgcgccgccggggcgctgctcggcaccaccgcaggcgagctggagccgagcgcccacttcacagatctgggcggggattcgctgtcggcgttgaccttcgccaacctgctgcgcgacatcttcgacgtcgacgtccccgtcggtgtgatcgtcagcccggccaccgatctgcaggcccttgccgactacgtcgagtccgcccgccggcacgggtcggtgcggcccactttcgaatcggtgcacgggcattcgggacgacccgggaccgaggtgcatgcccgcgatctgacgttggacgaattcgtcgacgccgcgaccctggcgcacgcgccgacgttgcccggaccgcgcgccgaggtccgcaccgtcctgctgaccggggcgaccggcttcctcggccggtatctcgctctcgaatggcttgagcggatggcgctggtcggcggcaagctgatctgcctggtccgcgccaaagacgatgcggcagcgcgggttcggctggacagcacgttcgacagcggggacccggagctgctgcggcactaccgacggctggcagccgaccatctcgaagtgatcgccggcgacaaggccgacgccgatctcggactcgacgcgcggacgtggcagcggctcgcggacaccgtcgatctgatcgtcgatcccgccgccctggtcaaccacgtcctgccgtaccgccaactgttcgccccgaacgtgctcggcaccgccgaactgctccgcatcgcgctgacaacgaggatgaagccgttcgtgtacgtgtcgacgatcggcgtcggcgccggtatcgaacccgcgaggttcaccgaggacgccgacatcaggcagatcagcgcgacgcgcagaatcgacgacagctacgccaacggctacggcaacagcaagtgggccggcgaggtgctgctgcgcgaggcgcacgatctgtgcggcctgcccgtttcggtgttccgctgcgacatgatcctggccgacaccacctacgccggtcagctgaacctgccggacatgttcacccgcctgatcttcagcctggtcgccaccggcgtcgcgcccgagtcgttctaccacctcgccaccgacggcacccggcaacgggcccactatgacgggctaccggtggagttcatcgccgaagcgatctcgaccctcggctctgacgtcgcctccgggttccggacgtatcacgtgatgaatccccacgacgacgggataggcctcgacgagtacgtggactggctcatcgacgcaggccatccgattcgacgcgtcggcgactacccgacgtggctgcaacggttcacggtggcgatcaccgcgctgccggaacggcagcggcaggcctcactgttgccgctgctgcacaactaccagcacccggagacgccgatccgcggctccatcgcaccgacagacagattccgtgaagcggtccaggacgccaaaatcggtccggacaaagacattccacacgtgacaccgcagatcgtcatcaagtacgtcaccgacctgcagcgactcggactgctctaa

SEQ ID NO: 73 - protein, 1174 aa, Mycobacterium sp. KMS
MSTETREARLQQRIAHLFTTDPQFAAARPDPRISDAVDRDDTRLTAIVSAVMSGYADRPALGQRAAEFVTDPQTGRTTMELLPRFDTITYRELLDRVRALTNAWHADGVRPGDRVAILGFTGIDYTVVDLALIQLGAVAVPLQTSAAVEALRPIVAETEPMLIATGVDHVDAAAELALTGHRPSRVVVFDHREQVDDERDAVRAATARLGDAVPVETLAEVLRRGAHLPAVAPHVFDEADPLRLLIYTSGSAGAPKGAMYPESKVAGMWRASAKAAWNNDQTAIPSITLNFLPMSHVMGRGLLCGTLSTGGTAYFAARSDLSTLLEDLRLVRPTQLSFVPRIWDMLFQEFVGEVDRRVNDGADRPTAEADVLAVQRHELLGGRFVTAMTGSAPISLEMKTWVETLLDMHLVEGYGSTEAGAVFVDGHIQRPPVLDYKLVDVPDLGYFSTDRPHPRGELLVRSTQLFPGYYKRPDVTAEVFDDDGFYRTGDIVAEVGPDQVQYLDRRNNVLKLAQGEFVTISKLEAVFAGSALVRQIYVYGNSARSYLLAVVVPTDDAVARHDPASLKTAISASLQQAAKTAGLQSYELPRDFLVETQPFTLENGLLTGIRKLARPKLKARYGDRLEALYVELVEGQAGELRTLRRDGAKRPVAETVGRAAAALLGAAAADVRPDAHFTDLGGDSLSALTFGNLLQEIFGVDVPVGVIVSPAADLASIAAYIEAEQASTGKRPTYASVHGRDAEQVHARDLTLDKFIDAETLSAATELPGPSGEVRTVLLTGATGFLGRYLALDWLERMALVDGKVICLVRAKDDAAARKRLDDTFDSGDPKLLAHYRKLAADHLEVLAGDKGEADLGLPHPVWQRLADTVDLIVDPAALVNHVLPYSQLFGPNALGTAELIRLALTTRIKPFTYVSTIGVGAGIEPGRFTEDDDIRVISPTRAVDTGYANGYGNSKWAGEVLLREAHDLCGLPVAVFRCDMILADTTYAGQLNLPDMFTRMMLSLVTTGIAPKSFHPLDAKGHRQSAHYDGLPVEFVAESISALGAQAVDEAGTGFATYHVMNPHDDGIGLDEFVDWLVEAGYRIDRIDYYAAWLQRFETALRALPERTRQYSLLPLLHNYQRPAHPINGAMAPTDRFRAAVQEAKLGPDKDIPHVTPAVIVKYATDLELLGLI

SEQ ID NO: 74 - DNA, 3525 bp, Mycobacterium sp. KMS
atgtccaccgagacccgtgaagcgcgcctgcagcagcgcatcgcgcatctgttcaccaccgacccgcagttcgccgccgcccggcccgacccccggatcagcgatgccgtcgaccgcgatgacacgcggctgaccgccatcgtctccgcggtcatgtcggggtacgccgaccggccggcactcgggcagcgcgccgccgaattcgtcaccgacccgcagaccggccgcaccacgatggagctgctcccccgcttcgacaccatcacctaccgggagctgctcgaccgcgtccgggcgctcaccaacgcgtggcacgccgacggggtgcgccccggcgaccgtgtcgcaatcctcggattcaccggcatcgactacaccgtggtcgacctcgccctgatccagctcggcgcggtcgcggtgccgctgcagaccagcgccgccgtggaggcgttgcgcccgatcgtggccgagaccgaaccgatgctcatcgccaccggcgtcgatcatgtcgacgccgccgcggaactcgcactcaccggccaccgtccgtcccgggtggtggtcttcgaccaccgcgagcaggtcgacgacgaacgcgacgcggtgcgggccgcgacggccaggctgggagacgccgtccccgtcgagacactcgccgaggtgttgcggcggggcgcccatctgcccgccgtggcgccgcacgtgttcgacgaggccgatccactgcggctgctgatctacacttccggcagcgccggcgcccccaagggcgcgatgtatcccgagagcaaggtcgccggcatgtggcgcgcgtcggccaaggccgcctggaacaacgatcagacagcgattccgtcgatcaccctgaacttcctgccgatgagccacgtcatgggtcgcggcctgctgtgcggcacgctcagcaccggtggcaccgcgtatttcgccgcccgcagcgatctgtcgacgctgctcgaggacctgcgcctggtacggcccacccaactcagcttcgtgccgcggatctgggacatgctcttccaggagttcgtcggcgaggtcgaccggcgggtgaacgacggtgcggaccgccccaccgcggaggccgacgtgctggccgtacagcgtcacgagctgctcggtggccggttcgtcaccgcgatgaccggttcggcgcccatctccctcgagatgaagacatgggtggagaccctgctcgacatgcacctggtcgagggttacggctcgacggaggccggcgcggtgttcgtcgacggccacatccagcgcccaccggtgctcgactacaaactcgtcgacgtccccgacctcggctacttcagcaccgaccggccgcacccgcgcggtgagctgctggtccgctccacgcagctattccccggctactacaaacgtcccgacgtcaccgccgaggtgttcgacgacgacggcttctaccgcacgggcgacatcgtcgccgaggtcggccccgatcaggtgcagtacctcgaccgccgcaacaacgtgctcaaactcgcccagggtgagttcgtcaccatctccaaactcgaggcggtcttcgccggcagcgccctggtccgccagatctacgtgtacggcaacagtgcgcgctcctacctgctggccgtcgtcgtgccgaccgacgatgcggtggcccggcacgacccggcatcgctcaagaccgcgatcagcgcctcgctgcagcaggccgcgaagaccgccggtctgcagtcctacgagctgccgcgtgacttcctcgtcgagactcaaccgttcacgctggagaacggactactgaccggcatccgcaagctggcgcgcccgaaactcaaggcgcgctacggcgatcggctcgaggcgctctacgtcgaactggtcgaaggacaggcaggcgaattgcgcaccctgcgccgggacggcgcgaagcgtccggtggccgagacggtcggccgcgccgcggccgcgctgctcggcgccgccgccgccgacgtgcgccccgacgcgcacttcaccgacctcggcggagactcgttgtcggcgttgaccttcggcaatctgctgcaggagatcttcggcgtcgacgtcccggtcggggtgatcgtcagcccggcggccgacctggcgtcgatcgcggcgtacatcgaggccgaacaggcctcgaccggtaagcggccgacctacgcgtcggtgcacgggcgcgacgccgaacaggtacacgcgcgcgacctcaccctggacaagttcatcgacgccgaaacactctccgctgcaacagaactgcccggcccgagcggtgaggtgcgcaccgtgctgctgaccggggccaccggattcctcggccgctacctggcgctggactggctcgaacggatggccctggtcgacggcaaggtcatctgcctggtccgcgcgaaggacgatgcggccgcccgcaaacgcctcgacgacaccttcgacagcggcgatccgaagctgctggcgcactaccgcaagctggccgccgaccacctcgaagtgctggccggcgacaagggtgaggcggatctcgggctgccgcatcctgtctggcagcgcctggccgacaccgtcgacctcatcgtcgacccggccgccctggtcaaccacgtactgccgtacagccagctgttcgggcccaacgcgctgggcactgccgagctgatccggcttgcgctcaccacccgcatcaaaccgttcacctacgtgtcgacgatcggcgtcggcgccggtatcgaaccgggccgtttcaccgaggacgacgacatccgggtgatcagcccgacgcgggccgtcgacaccgggtacgccaacggctacggcaacagcaagtgggccggtgaggtgttgttgcgcgaggcgcacgatctgtgcgggctccccgtggcggtgttccggtgcgacatgatcctggccgacaccacctacgccggccagctcaacctgccggacatgttcacccggatgatgctgagcctggtgaccacgggtatcgcgccgaaatcgttccacccactcgacgcaaagggccaccggcagagcgcccactacgacgggctgccggtcgagttcgtcgccgaatcgatctccgcgctgggagcgcaggcggtcgacgaggcgggaacgggtttcgccacctaccacgtgatgaacccccacgacgacgggatcggcctcgacgaattcgtcgactggctcgtcgaggcggggtatcgcatcgaccgcatcgactactacgcggcctggctgcagcggttcgaaaccgccctgcgggcgctgcccgagcgcactcggcagtactcactgctcccgctgctgcacaactaccagcggcctgcgcacccgatcaacggggcgatggccccgaccgaccggttccgcgctgcggtgcaggaggcaaagctcggcccggacaaggacattccccacgtcactccagcggtgatcgtcaagtacgccaccgacctggagctgctgggcctgatctag

SEQ ID NO: 75 - protein, 1173 aa, Mycobacterium avium
MSTATHDERLDRRVHELIATDPQFAAAQPDPAITAALEQPGLRLPQIIRTVLDGYADRPALGQRVVEFVTDAKTGRTSAQLLPRFETITYGEVAQRVSALGRALSDDAVHPGDRVCVLGFNSVDYATIDMALGAIGAVSVPLQTSAAISSLQPIVAETEPTLIASSVNQLSDAVQLITGAEQAPTRLVVFDYHPQVDDQREAVQDAAARLSSTGVAVQTLAELLERGKDLPAVGEPPADEDSLALLIYTSGSTGAPKGAMYPQSNVGKMWRRGSKNWFGESAASITLNFMPMSHVMGRSILYGTLGNGGTAYFAARSDLSTLLEDLELVRPTELNFVPRIWETLYGEFQRQVERRLSESGDAGERRAVEAEVLAEQRQYLLGGRFTFAMTGSAPISPELRNWVESLLEMHLMDGYGSTEAGMVLFDGEIQRPPVIDYKLVDVPDLGYFSTDRPHPRGELLLRTENMFPGYYKRAETTAGVFDEDGYYRTGDVFAEIAPDRLVYVDRRNNVLKLAQGEFVTLAKLEAVFGNSPLIRQIYVYGNSAQPYLLAVVVPTEEALASGDPETLKPKIADSLQQVAKEAGLQSYEVPRDFIIETTPFSLENGLLTGIRKLAWPKLKQHYGERLEQMYADLAAGQANELAELRRNGAQAPVLQTVSRAAGAMLGSAASDLSPDAHFTDLGGDSLSALTFGNLLREIFDVDVPVGVIVSPANDLAAIASYIEAERQGSKRPTFASVHGRDATVVRAADLTLDKFLDAETLAAAPNLPKPATEVRTVLLTGATGFLGRYLALEWLERMDMVDGKVIALVRARSDEEARARLDKTFDSGDPKLLAHYQQLAADHLEVIAGDKGEANLGLGQDVWQRLADTVDVIVDPAALVNHVLPYSELFGPNALGTAELIRLALTSKQKPYTYVSTIGVGDQIEPGKFVENADIRQMSATRAINDSYANGYGNSKWAGEVLLREAHDLCGLPVAVFRCDMILADTTYAGQLNLPDMFTRLMLSLVATGIAPGSFYELDADGNRQRAHYDGLPVEFIAAAISTLGSQITDSDTGFQTYHVMNPYDDGIGLDEYVDWLVDAGYSIERIADYSEWLRRFETSLRALPDRQRQYSLLPLLHNYRTPEKPINGSIAPTDVFRAAVQEAKIGPDKDIPHVSPPVIVKYITDLQLLGLL

SEQ ID NO: 76 - DNA, 3522 bp, Mycobacterium avium
atgtcgactgccacccatgacgaacgactcgaccgtcgcgtccacgaactcatcgccaccgacccgcaattcgccgccgcccaacccgacccggcgatcaccgccgccctcgaacagcccgggctgcggctgccgcagatcatccgcaccgtgctcgacggctacgccgaccggccggcgctgggacagcgcgtggtggagttcgtcacggacgccaagaccgggcgcacgtcggcgcagctgctcccccgcttcgagaccatcacgtacggcgaagtggcgcagcgtgtttcggcgctgggccgcgccctgtccgacgacgcggtgcaccccggcgaccgggtgtgcgtgctgggcttcaacagcgtcgactacgccaccatcgacatggcgctgggcgccatcggcgccgtctcggtgccgctgcagaccagcgcggcaatcagctcgctgcagccgatcgtggccgagaccgagcccaccctgatcgcgtccagcgtgaaccagctgtccgacgcggtgcagctgatcaccggcgccgagcaggcgcccacccggctggtggtgttcgactaccacccgcaggtcgacgaccagcgcgaggccgtccaggacgccgcggcgcggctgtccagcaccggcgtggccgtccagacgctggccgagctgctggagcgcggcaaggacctgcccgccgtcggggagccgcccgccgacgaggactcgctggccctgctgatctacacctccgggtccaccggcgcccccaagggcgcgatgtacccgcagagcaacgtcggcaagatgtggcgccgcggcagcaagaactggttcggcgagagcgccgcgtcgatcaccctgaacttcatgccgatgagccacgtgatgggccgaagcatcctctacggcacgctgggcaacggcggcaccgcctacttcgccgcccgcagcgacctgtccaccctgctcgaggacctcgagctggtgcggcccaccgagctcaacttcgtcccgcggatctgggagacgctgtacggcgaattccagcgtcaggtcgagcggcggctctccgagtccggggacgccggcgaacgtcgcgccgtcgaggccgaggtgctggccgagcagcgccagtacctgctgggcgggcggttcaccttcgcgatgacgggctcggcgcccatctcgccggagctgcgcaactgggtcgagtcgctgctcgaaatgcacctgatggacggctacggctccaccgaggccggaatggtgttgttcgacggggagattcagcgcccgccggtgatcgactacaagctggtcgacgtgccggacctgggctacttcagcaccgaccggccgcatccgcgcggcgagctgctgctgcgcaccgagaacatgttcccgggctactacaagcgggccgaaaccaccgcgggcgtcttcgacgaggacggctactaccgcaccggcgacgtgttcgccgagatcgccccggaccggctggtctacgtcgaccgccgcaacaacgtgctcaagctggcgcagggcgaattcgtcacgctggccaagctggaggcggtgttcggcaacagcccgctgatccgccagatctacgtctacggcaacagcgcccagccctacctgctggcggtcgtggtgcccaccgaggaggcgctggcctcgggtgaccccgagacgctcaagcccaagatcgccgactcgctgcagcaggtcgccaaggaggccggcctgcagtcctacgaggtgccgcgcgacttcatcatcgagaccaccccgttcagcctggaaaacggtctgctgaccgggatccggaagctggcgtggccgaaactgaagcagcactacggggaacggctggagcagatgtacgccgacctggccgccggacaggccaacgagctggccgagctgcgccgcaacggtgcccaggcgccggtgctgcagaccgtgagccgcgccgcgggcgccatgctgggttcggccgcctccgacctgtcccccgacgcccacttcaccgatctgggcggagactcgttgtcggcgttgacattcggcaacctgctgcgcgagatcttcgacgtcgacgtgccggtgggcgtcatcgtcagcccggccaacgacctggcggccatcgcgagctacatcgaggccgagcggcagggcagcaagcgcccgacgttcgcctcggtgcacggccgggacgcgaccgtggtgcgcgccgccgacctgacgctggacaagttcctcgacgccgagacgctggccgccgcgccgaacctgcccaagccggccaccgaggtgcgcaccgtgctgctgaccggcgccaccggcttcctgggccgctacctggccctggaatggctggagcggatggacatggtggacggcaaggtcatcgccctggtccgggcccgctccgacgaggaggcacgcgcccggctggacaagaccttcgacagcggcgacccgaagctgctcgcgcactaccagcagctggccgccgatcacctggaggtcatcgccggcgacaagggcgaggccaatctgggcctgggccaagacgtttggcaacgactggccgacacggtcgacgtgatcgtcgaccccgccgcgctggtcaaccacgtgttgccgtacagcgagctgttcgggcccaacgccctgggcaccgcggagctgatccggctggcgctgacgtccaagcagaagccgtacacctacgtgtccaccatcggcgtgggcgaccagatcgagccgggcaagttcgtcgagaacgccgacatccggcagatgagcgccacccgggcgatcaacgacagctacgccaacggctacggcaacagcaagtgggccggcgaggtgctgctgcgcgaggcgcacgacctgtgcgggctgcccgtcgcggtgttccgctgcgacatgatcctggccgacaccacgtatgccgggcagctcaacctgccggacatgttcacccggctgatgctgagcctggtggccaccgggatcgcgcccggctcgttctacgagctcgacgccgacggcaaccggcagcgggcgcactacgacggcctgccggtcgagttcatcgccgcggcgatctcgacgctgggttcgcagatcaccgacagcgacaccggcttccagacctaccacgtgatgaacccctacgatgacggcatcggtctggacgagtacgtcgattggctggtggacgccggctattcgatcgagcggattgccgactactccgaatggctgcggcggttcgagacctcgctgcgggccctgccggaccggcagcgccagtactcgctgctgccgctgctgcacaactaccgcacgccggagaagccgatcaacgggtcgatagctcccaccgacgtgttccgggcagcggtgcaggaggcgaaaatcggccccgacaaagacattccgcacgtgtcgccgccggtcatcgtcaagtacatcaccgacctgcagctgctcgggctgctctga

SEQ ID NO: 77 - protein, 1174 aa, Mycobacterium sp. JLS
MSTETREARLQQRIAHLFATDPQFAAARPDPRISDAVDRDDARLTAIVSAVMSGYADRPALGQRAAEFATDPQTGRTTMELLPRFDTITYRELLDRVRALTNAWHADGVRPGDRVAILGFTGIDYTVVDLALIQLGAVAVPLQTSAAVEALRPIVAETEPMLIATGVDHVDAAAELALTGHRPSQVVVFDHREQVDDERDAVRAATARLGDAVPVETLAEVLRRGAHLPAVAPHVFDEADPLRLLIYTSGSTGAPKGAMYPESKVAGMWRASAKAAWNNDQTAIPSITLNFLPMSHVMGRGLLCGTLSTGGTAYFAARSDLSTLLEDLRLVRPTQLSFVPRIWDMLFQEFVGEVDRRVNDGADRPTAEADVLAELRQELLGGRFVTAMTGSAPISPEMKTWVETLLDMHLVEGYGSTEAGAVFVDGHIQRPPVLDYKLVDVPDLGYFSTDRPHPRGELLVRSTQLFPGYYKRPDVTAEVFDDDGFYRTGDIVAELGPDQLQYLDRRNNVLKLAQGEFVTISKLEAVFAGSALVRQIFVYGNSARSYLLAVVVPTDDAVARHDPASLKTAISASLQQAAKTAGLQSYELPRDFLVETQPFTLENGLLTGIRKLARPKLKARYGDRLEALYVELAEGQAGELRTLRRDGAKRPVAETVGRAAAALLGAAAADVRPDAHFTDLGGDSLSALTFGNLLQEIFGVDVPVGVIVSPAADLASIAAYIETEQASTGKRPTYASVHGRDAEQVRARDLTLDKFIDAETLSAATELPVPIGEVRTVLLTGATGFLGRYLALDWLERMALVDGKVICLVRAKDDAAARKRLDDTFDSGDPKLLAHYRKLAADHLEVLAGDKGEADLGLPHQVWQRLADTVDLIVDPAALVNHVLPYSQLFGPNALGTAELIRLALTTRIKPFTYVSTIGVGAGIEPGRFTEDDDIRVISPTRAVDTGYANGYGNSKWAGEVLLREAHDLCGLPVAVFRCDMILADTTYAGQLNLPDMFTRMMVSLVTTGIAPKSFHPLDAKGHRQRAHYDGLPVEFVAESISALGAQAVDEAGTGFATYHVMNPHDDGIGLDEFVDWLVEAGYRIDRIDDYAAWLQRFETALRALPERTRQYSLLPLLHNYQRPAHPINGAMAPTDRFRAAVQEAKLGPDKDIPHVTPGVIVKYATDLELLGLI

SEQ ID NO: 78 - DNA, 3525 bp, Mycobacterium sp. JLS
atgtccaccgagacccgtgaagcgcgcctgcagcagcgcatcgcgcatctgttcgccaccgacccgcagttcgccgccgcccggcccgacccccggatcagcgatgccgtcgaccgcgatgacgcgcggctgaccgccatcgtctccgccgtcatgtcggggtacgccgaccggccggcactcgggcagcgcgccgccgaattcgccaccgacccgcagaccggccgcaccacgatggagctgctcccccgcttcgacaccatcacctaccgggagctgctcgaccgcgtccgggcgctcaccaacgcgtggcacgccgacggggtgcgccccggcgaccgcgtcgcaatcctcggattcaccggcatcgactacaccgtcgtcgacctcgccctgatccagctcggcgcggtcgcggtgccgctgcagaccagcgccgccgtggaggcgctgcgcccgatcgtggccgagaccgaaccgatgctcatcgccaccggcgtcgatcatgtcgacgccgccgcggaactcgcactcaccggccaccgtccgtcccaggtggtggtcttcgaccaccgcgagcaggtcgacgacgaacgcgacgcggtgcgggccgcgacggcccggctgggagacgcggtgcccgtcgagacactcgccgaggtgttgcggcgtggcgcccatctgcccgccgtggcaccgcacgtgttcgacgaggccgatccactgcggctgctgatctacacctccggcagcaccggcgcccccaagggcgcgatgtatcccgagagcaaggtcgccggcatgtggcgcgcgtcggccaaggccgcctggaacaacgatcagacggcgattccgtcgatcaccctgaacttcctgccgatgagccacgtcatgggtcgcggcctgctgtgcggcacgctcagcaccggtggcaccgcgtatttcgccgcccgcagcgatctgtcgacgctgctcgaggacctgcgcctggtacggcccacccaactcagcttcgtgccacggatctgggacatgctcttccaggagttcgtcggcgaggtcgaccggcgggtgaacgacggtgcagaccgccccaccgcggaggccgacgtgctggccgaactgcgccaggagctgctcggtggccggttcgtcaccgcgatgaccggttcggcgcccatctcccccgagatgaagacatgggtggagaccctgctcgacatgcacctggtcgagggttacggctcgacggaggccggcgcggtgttcgtcgacggccacatccagcgcccgccggtgctcgactacaaactcgtcgacgtccccgacctcggctacttcagcaccgaccggccgcacccgcgcggtgagctgctggtccgctccacgcagctgttccccggctactacaagcgtcccgacgtcaccgccgaggtgttcgacgacgacggcttctaccgcacgggcgacatcgtcgccgagctcggccccgaccagctgcagtacctcgaccgccgcaacaacgtgctcaaactcgcccagggtgagttcgtcaccatctccaaactcgaggcggtcttcgccggcagcgccctcgtccgccagatcttcgtgtacggcaacagtgcgcgctcctacctgctggccgtcgtcgtgccgaccgacgatgcggtggcccggcacgacccggcatcgctcaagaccgcgatcagcgcctcgctgcagcaggccgcgaagaccgccggtctgcagtcctacgagctgccgcgtgacttcctcgtcgagactcaaccgttcacgctggagaacggactactgaccggcatccgcaagctggcccgcccgaaactcaaggcgcgctacggcgatcggctcgaggcgctctacgtcgaactggccgaaggacaggcaggcgaactgcgcaccctgcgccgggacggcgcgaagcgtccggtggccgagacggtcggccgcgccgcggccgcgctgctcggcgccgccgccgccgacgtgcgccccgacgcgcacttcaccgacctcggcggagactcgttgtcggcgttgaccttcggcaatctgctgcaggagatcttcggcgtcgacgtcccggtcggggtgatcgtcagcccggcggccgacctggcgtcgatcgcggcgtacatcgagaccgaacaggcctcgaccggcaagcggccgacctacgcgtcggtgcacgggcgcgacgccgaacaggtacgcgcgcgcgacctcaccctggacaagttcatcgacgccgaaacactctccgctgcaacagaactgcccgtcccgatcggtgaggtgcgcaccgtgctgctgaccggggccaccggattcctcggccgctacctggcgctggactggctcgaaaggatggccctggtcgacggcaaggtcatctgcctggtccgcgcgaaggacgatgcggccgcccgcaaacgcctcgacgacaccttcgacagcggcgatccgaagctgctggcgcactaccgcaagctggccgccgaccacctcgaagtgctggccggcgacaagggtgaggcggatctcgggctgccgcatcaggtctggcagcgactggccgacaccgtcgacctcatcgtcgacccggccgccctggtcaaccacgtactgccgtacagccagctgttcgggcccaacgcgctgggcactgccgagctgatccggcttgcgctcaccacccgcatcaaaccgttcacctacgtgtcgacgatcggcgtcggcgccggtatcgaaccgggccgtttcaccgaggacgacgacatccgggtgatcagcccgacgcgggccgtcgacaccgggtacgccaacggctacggcaacagcaagtgggccggtgaggtgttgttgcgcgaggcgcacgatctgtgcgggctccccgtggcggtgttccggtgcgacatgatcctggccgacaccacctacgccggccagctcaacctgccggacatgttcacccggatgatggtgagcctggtgaccacgggtatcgcgccgaagtcgttccacccactcgacgcaaagggccaccggcagcgcgcccactacgacgggctgccggtcgagttcgtcgccgaatcgatctccgcgctgggagcgcaggcggtcgacgaggcgggaacgggtttcgccacctaccacgtgatgaacccccacgacgacgggatcggcctcgacgaattcgtcgactggctcgtcgaggcggggtatcgcatcgaccgcatcgacgactacgcggcctggctgcaacggttcgaaaccgcgctgcgggcgctgcccgagcgcactcggcagtactcactgctcccgctgctgcacaactaccagcggcctgcgcacccgatcaacggggcgatggccccgaccgaccggttccgcgccgcggtgcaggaggcaaagctcggcccggacaaggacattccccacgtcacccccggggtgatcgtcaagtacgccaccgacctggaactgctggggctgatctag

SEQ ID NO: 79 - protein, 95 aa, Mycobacterium leprae
MSTVDGVCDEDIYYYYDCIYCAADVASPTGYLPGGLFSLAKLLVIRGEKQYVFGLNDSTSVGPGPGNMPWLDDPGLSAVIASSVAAAELAAARSW

SEQ ID NO: 80 - DNA, 288 bp, Mycobacterium leprae
atgagcaccgtggatggtgtgtgtgatgaagacatatattactattatgactgcatatattgcgctgccgatgttgccagcccgactgggtatttacccggaggactctttagcttggcgaagctgcttgttatacgtggggagaagcagtatgtcttcggcctgaatgactcgacgagtgtcggccccgggccgggcaacatgccctggctggacgacccaggcctgtctgctgtcattgcgagttccgtcgcagcggctgaattggctgctgcgcgatcctggtaa

SEQ ID NO: 81 - protein, 1131 aa, Clavibacter michiganensis
MSTEQMGTEQMGSQHEDTSIEAIFAQHADRTALRQRSGPDITDMGFRELWDRAGALAAALGETVSAGDRIAVLGTATADAVTLDLAAWILGAVSVPLQASAPVAALRAIVEETTPVWIAATADQAATARAVAEASGDGIRTMRLDTDTDADTDTDAALTLGALVARGAGLRRRSPWHPAPGDDPLALLLYTSGSTGTPKGAMYTRSMVERMWHALRPDPAAPADASTTADDGDAAAIVGYAYLPMSHLTGRSSLLATLGRGGTVALATSTDLSTLFDDLRTFAPTEFVFVPRVAELVRQEGDREEQRRLTAGSTDRDAVRAEVQADLRARAFGGRIHRAICTSAPLTPELRTYIEGCLGLTLHDLYGSTEAGGILHDGVIQQPPVTEHKLVDVPELGYRTTDRPHPRGELLVKSASVIAGYFRRPDVTAAVFDEDGFYRTGDVMAQTGPGTYEYVDRRNNVIKLSQGEFVAVASLEATYGGTPEVHQIALHGDSRHAFLVAVVVPADPAASERDILAALQRTAREHGLAPYEVPRGVIVEPDPFTVDGGMLSDAGKLLRLRLTQRYGERLAALYDALEEQQSGTLVAALRERADDEPTVDTVVRAALLLLGAEVSPATAAAARFSDLGGDSLSALTFSGILEDVFGTEVPVGVLTDPTNDLAAVAAYVERSASDDRPTVTRVHGAGASTLRVGDLRLDRMLGGIPTPVPRASAARPGSRTVLLTGANGYLGRFLAIDWLERLAATGGTLVCIVRGADDADARRRLEAAFAADPAFARRFAELSGSLEVLAGDVSEHRLGLDDERWIDLAARVDLVAHAAALVNHVLPYSALFGPNVVGTAEAIRLAIAAGSVPVTFVSSVAVAGGARPGATADAEPSAPGALDEHADIRATIPEWAVGDEYANGYGASKWASEVLLREAHEHHGVPVAVFRSDMILAHPRWRGQVNLPDVFTRLIWSVLTTGLAPASFVRRGPDGERQRSHYDGLPADFTAAAIDGIGAALTEGHRTFNVVNPHDDGVSLDTFVDWIREDGHDIARVDDHAEWVDRFRAALGALPDADRARSVLPLMHAFASPEEPHAGSAIPADAFAEAVRAVRPLGSPDIPSLDHALIAKVADDLAFLGLLAPARAAAA

SEQ ID NO: 82 - DNA, 3396 bp, Clavibacter michiganensis
atgagcactgagcagatgggcaccgagcagatggggagccagcacgaggacacgtcgatcgaggcgatcttcgcgcagcacgccgaccggacggcgctgcggcagcgatccgggccggacatcacggacatgggcttccgggagctgtgggaccgggcgggcgcgctggccgcggcgctcggcgagaccgtgtccgccggagaccgcatcgcggtgctcggcacggcgaccgcggacgccgtcacgctcgacctcgccgcgtggatcctcggcgcggtgagcgtgcccctccaggcgagcgcgcccgtcgcggccctgcgcgcgatcgtcgaggagacgacgccggtgtggatcgcggccaccgccgaccaggccgcgacggcccgggcggtcgccgaggcatcgggcgacggcatccggacgatgcggctcgacaccgacaccgacgcggacaccgacaccgacgccgccctgacgctcggcgcgctcgtcgcccgcggggccggcctgcgtcgccggagcccgtggcaccccgcacccggcgacgacccgctcgcgctcctgctctacacgtcgggcagcacgggcacgccgaagggcgcgatgtacacgcgctccatggtcgagcggatgtggcacgccctccggcccgaccccgccgcgcccgccgacgcatccacgaccgcggacgacggagacgccgcagccatcgtcgggtacgcgtacctccccatgagccacctcaccggccgctcctccctgctcgccacgctcggccgcggcggcacggtcgcgctcgcgacctcgaccgacctgtcgacgctcttcgacgacctgcggaccttcgccccgaccgagttcgtcttcgtgccgcgcgtcgcggagctggtgcggcaggagggcgaccgcgaggagcagcgccgactcaccgccggcagcacggaccgggacgcggtccgcgccgaggtccaggccgacctgcgcgcccgcgcgttcggcggacggatccaccgggcgatctgcaccagcgcaccgctgacgccggagctccgcacgtacatcgagggatgcctcgggctgacgctgcacgacctgtacgggtcgaccgaggccggcggcatcctccacgacggggtgatccagcagcctcccgtcaccgagcacaagctcgtcgacgtccccgagctcgggtaccgcaccaccgaccgcccgcacccgcggggcgagctgctcgtcaagagcgcctccgtgatcgccgggtacttccgccggccggacgtcaccgccgcggtgttcgacgaggacggcttctaccggaccggcgacgtcatggcgcagaccggacccggcacctacgagtacgtcgaccgtcggaacaacgtgatcaagctgtcgcagggcgagttcgtcgcggtggcatcgctcgaggcgacgtacggcgggacgcccgaggtgcaccagatcgcgctgcacggcgacagccggcacgcgttcctcgtcgcggtcgtcgtcccggcggaccccgcggcgtcggagcgcgacatcctcgcggccctccagcgcaccgcccgcgagcacggcctcgccccctacgaggtgccccgcggcgtgatcgtcgaaccggatccgttcacggtcgacggcggcatgctctccgacgccggcaagctcctgcgcctgcgcctcacgcagcggtacggcgagcgcctcgccgccctctacgacgcgctcgaggagcagcagagcggcaccctcgtcgccgcgctccgcgaacgcgccgacgacgagccgacggtcgacacggtggtgcgcgccgccctcctgctcctcggggccgaggtgtcccccgcgaccgccgccgctgcccggttctccgacctcggcggcgactcgctgtccgcgctgacgttctccgggatcctcgaggacgtcttcggcaccgaggtgcccgtcggcgtcctcaccgacccgaccaacgacctcgccgccgtcgccgcctacgtggagcgctccgcctccgacgaccggccgaccgtgacccgcgtgcacggcgccggcgcatccaccctccgcgtgggcgacctccggctcgaccggatgctcggcggcatcccgacgccggtcccccgggcctcggccgcccggccgggatcccgcacggtcctgctcaccggcgcgaacggctacctcggccggttcctggccatcgactggctcgagcgcctcgctgcgacgggcggcacgctggtgtgcatcgtgcgcggcgccgacgacgccgacgcccggcgccgcctcgaggccgcgttcgccgcggatcccgcgttcgcccggcgcttcgccgagctgtcgggctcgctcgaggtgctggccggagacgtcagcgagcaccgcctcggcctcgacgacgagcggtggatcgacctggccgcgcgggtcgacctcgtcgcgcacgcggctgccctcgtgaaccacgtcctcccgtactcggcgctgttcggtccgaacgtcgtcggcaccgccgaggcgatccgcctggcgatcgccgccggcagcgtgcccgtcaccttcgtctcgagcgtcgcggtcgcgggcggcgcgcggccgggcgcgaccgccgacgccgagccgtcggcgcccggcgcgctcgacgagcacgccgacatccgcgccacgatccccgagtgggccgtcggcgacgagtacgccaacgggtacggcgcgagcaagtgggcgagcgaggtgctgctccgcgaggcgcacgagcaccacggcgtccccgtggccgtgttccgctccgacatgatcctggcgcacccccgctggcgcggtcaggtgaacctccccgacgtcttcacccggctgatctggagcgtgctcaccaccggcctcgcccccgcatcgttcgtgaggcgcggccccgacggcgagcggcagcggtcgcactacgacgggctgccggccgacttcacggcggcggcgatcgacgggatcggcgcggcgctcaccgaggggcaccgcaccttcaacgtcgtgaacccccacgacgacggcgtctcgctcgacaccttcgtcgactggatccgcgaggacggccacgacatcgcgcgcgtggacgaccacgcggagtgggtcgaccggttccgcgcggcgctgggagcgctcccggacgcggaccgcgcccggtccgtcctgccgctgatgcacgcgttcgcctcgcccgaggagccgcacgccggctcggcgatcccggcggatgcgttcgccgaggccgtccgcgcggtgcgcccgctcgggtcgccggacatcccgtctctcgaccacgcgctcatcgccaaggtcgccgacgacctcgcgttcctggggctgctcgcgccggcgcgggcggcggctgcctga

SEQ ID NO: 83 - protein, 1165 aa, Salinisopora arenicola
VTTTEQTLTERLIAEDEQIRRAQVSAEVSAAMRVPGMSQAQIVAAGFTGYADRAALGERAREAVTDPVTGRTTHRLLPWFDTITYGEVRSRVLAISAAWWHDVDAPLRPGAFVVSVGVPSADLVTVELAVLHTGAVSVPLQVSSTAEQLRPILDEAAPLIVATSVDRLAVVTAAMSGNASVRRIMVLNHDAAITAHRDAVDAARSALAGTAVVVHTLTEVLDRGRGLPAPEPYAAPTGEDPLSLLIYTSGSTGTPKGAMFPESMTRANWVRFDPKPTDMAVIRLNYLPLSHNVGRIVLFEALAVGGIAFFTAHSDLSTLLEDMALARPTDLFLIPRLCDMLAQRHDSELARRRITTADHEGVRQVHTHLREAVLGGRVTRAMSLSAPLSPQLRRFVESCLGFAVHDVFGSTEAGGLLVNGRVLRPPVLDYRLVDVPDLGYFTTDRPYPRGELLVRTATIIPGYYQRPELNAELFTEDGYYRTGDIMAEYGPDHLGYVDRTTSVLKLSQGEFVAVSRLEELFAASPLIRQIYLYGNSERPYLLAVVVPTEEAHAATREPAALKAVLGESLQRIAQQHGLHPYEVPRDLLIETTPFSTANGLLSDIRKPLRPKLKTRYAPRLEALYTELAEREADRIRTLRDAGSAQPVLPALREAARAFLGRPGAALDVNDRFVDLGGDSLSALALSNLLSDIFEVRVPVGIMISATGTLGSVAAWIEAERATAGAGIGRATPTSVHGANLTQVHADDLTLGTFLDVTTLAAAACLPRAPLSDPRVVLLTGATGYLGRFLALEWLDRLSRSGGTLVCVVRAADDAEAARRLESVYGSSDPELLERFRSLAGHVRVLAGDVAEARFGLPAGVWQELAETVDLIVHSAALVNHVLPYEQLFGPNVAGTAELVRLAVSVRVKGIAFLSTVAVITSQTTTPDEDADIRQASPHRVLDDSYANGYAASKWAGEVLLRRAHEEYGVPVSVFRSDVILAHSRYAGQLNVPDMFTRLLLSILATGIAPASFYRTGPDGERQPAHYDGLPVDFTAAAVAAVGVTEGHRTFNVLNPHEDGIGLDTFVDWLVAAGHPVQRIADHDEWVTRFATAMRGLPERQRRSSILPLLHAFAEPAPPTFGSRLPTDRFRAAVKAANVVPGNEIPHLDAALVTKYADDLRLLDLL

SEQ ID NO: 84 - DNA, 3498 bp, Salinispora arenicola
gtgaccaccacggagcagaccctcaccgagcggctcatcgccgaggacgagcagatccggcgggcccaggtcagcgccgaagtctccgccgcgatgcgggtgccgggcatgtcgcaggcccagatcgtggccgccggattcaccggttacgccgaccgcgccgccctgggtgagcgcgcccgcgaagccgtcaccgacccggtcaccggccgcaccacccaccggcttctgccatggttcgacaccatcacctacggcgaggtccggtcgcgggtgctggcgatctccgccgcctggtggcacgacgtggacgctccactccgtcccggcgccttcgtcgtttcggtcggcgtccccagcgccgacctcgtgacggtcgagctcgcggtgctacacaccggcgcggtcagtgtgccactgcaggtcagctccaccgccgagcaactgcgcccgatcctcgacgaggccgccccgctcatcgtggccacgagcgtggaccggctcgctgtggtgaccgcggcgatgtcgggcaacgcgtcggtgcgccggatcatggtcctgaaccacgacgcagcgatcaccgcccaccgggatgccgtggacgccgcgcgatcggcgctcgccggcaccgcagtcgtcgtgcacacattgaccgaggtgttggaccgtggacggggcctgcccgcccctgagccctacgcggcgcccacgggggaggatcccctgtcgctgttgatctacacctcgggcagtaccggtacgcccaagggcgcaatgtttccggagagcatgacccgcgccaactgggtgcgtttcgaccccaagccgaccgacatggcggtcatccggctcaactacctgccgctgagccacaacgtcggccgcatcgtgctgttcgaggcgctcgcggtgggcggcatcgccttcttcaccgcacacagtgacctgtccacgctcctggaggacatggccctcgcccggcccaccgacctgttccttatcccgcggctgtgcgacatgctcgcccagcgccacgacagcgaactggcccgccgccgcatcaccaccgcggatcacgagggggtccgacaggtccacacccatctgcgcgaggctgtcctcggcggcagggtgacccgcgcgatgtcgctgtccgcgccgctgagcccacagctgcgtcggttcgtggagtcgtgtctcggcttcgcggtgcacgatgtcttcgggtcgaccgaggccggcgggctgctcgtcaacggccgggtgctgcgcccgccggtgctcgactatcgcttggtcgacgtccccgacctcggctacttcaccaccgaccgtccgtaccctcgcggggagctgctggtgcggaccgcgacgatcatccccggctactaccagcggcccgagctcaacgccgagctgttcaccgaggacggctactaccgcaccggcgacatcatggccgagtacggccccgaccacctcggctatgtcgaccgcaccacgagcgtgctgaagctgtcacagggcgagttcgtggccgtgtcacggttggaggaactgttcgccgcctccccgctgatccggcagatctacctgtacggcaacagcgagcggccgtacctgctcgccgtggtcgtgcccacggaggaggcgcacgccgccacccgggaacccgcggcgctcaaggcggtgctcggcgagtcgctgcaacgcatcgctcagcagcacggcctgcacccgtacgaggtgccgcgcgacctcctcatcgagaccaccccgttcagcaccgccaacggtctgctctccgacatccgtaagcccctgcgtccgaagctcaagacccggtacgctcctcgactcgaagcgctctacaccgagctcgccgagcgcgaggccgaccggatccgcacgctgcgcgacgccggttccgcgcaacccgtgctgcccgcgttgcgcgaggctgcccgggcgttcctcggccgcccaggcgcagcgctcgacgtgaacgaccgctttgtggacctcggcggcgactccctgtcggccctggccctgtcgaacctgctgagcgacatcttcgaggtccgcgtcccggtcggcatcatgatcagcgcgaccggcacgctcggttccgtggcggcctggatcgaggccgagcgtgccaccgccggagcgggtatcggccgcgcgacgcccacctccgtgcacggtgcgaacctcacccaggtacacgccgatgacctgaccctcggcacgttcctcgacgtgacgaccctcgccgccgctgcctgcctgccccgggcgccgctgtccgacccgcgcgtggtgctgctgacgggtgcgaccggctatctgggccggttcctggccctcgagtggctggaccgcctttcccgtagcggcgggacgctcgtgtgcgtggtgcgcgccgccgacgatgcggaagccgcgcgccgcctggaaagtgtctatggctccagcgaccccgagttgctggagcgcttccgttcactcgccggccacgtgcgcgtgttggccggcgatgttgccgaagccaggttcggcctgccggccggggtgtggcaggaactggccgaaacggtggacctgatcgtgcactccgcggcactggtcaaccacgttctcccgtacgaacagctgttcgggcccaacgtggcgggaacggcggaactggtgcgcctcgccgtcagcgtacgggtgaagggaattgcctttctctccaccgttgccgtgatcacctcgcagaccacgacacccgacgaggacgcggacatccggcaggcgagcccgcaccgggtgctcgacgacagctacgcgaacggctacgcggccagcaagtgggcaggtgaggtgctcctgcgacgcgcccacgaggagtacggcgtgccggtcagcgtgttccgctcggacgtcatcctggcccactcccgctacgccgggcagctcaacgtcccggatatgttcacgcgcctgctcctgagcatcctggcgaccggtattgccccagcgtcgttttatcgcaccggcccggacggcgaacgccagccggcgcactacgacggtctcccggtcgacttcaccgcggcggccgtagccgcggtgggtgtcaccgagggacaccgcaccttcaacgtactgaatccacacgaggacggcatcgggctggatacctttgtggactggctcgtggcagccggacacccggtgcagcgcatcgcggaccacgacgagtgggtgacccgcttcgccacggccatgcgtgggctgcctgaacgccagcgccgcagctcgatcctgccgctcctacacgcctttgccgagcccgctccgccgaccttcggatccagactgccgacggaccggtttcgcgccgccgtgaaagccgccaacgtggtccccggcaacgagatcccgcacctcgatgcggccctcgtcaccaagtacgccgacgacctcaggctgctcgaccttctctga

SEQ ID NO: 85 - protein, 1184 aa, Mycobacterium abscessus
MTVTNETNPQQEQLSRRIESLRESDPQFRAAQPDPAVAEQVLRPGLHLSEAIAALMTGYAERPALGERARELVTDQDGRTTLRLLPRFDTTTYGELWSRTTSVAAAWHHDAAHPVKAGDLVATLGFTSIDYTVLDLAIMILGGVAVPLQTSAPASQWTTILAEAEPNTLAVSIELIGAAMESVRATPSIKQVVVFDYTPEVDDQREAFEAASTQLAGTGIAIETLDAVIARGAALPAAPLYAPSAGDDPLALLIYTSGSTGAPKGAMHSENIVRRWWIREDVMAGTENLPMIGLNFMPMSHIMGRGTLTSTLSTGGTGYFAASSDMSTLFEDMELIRPTALALVPRVCDMVFQRFQTEVDRRLASSDTASAEAVAAEVKADIRDNLFGGRVSAVMVGSAPLSEELGEFIESCFELNLTDGYGSTEAGMVFRDGIVQRPPVIDYKLVDVPELGYFSTDKPHPRGELLLKTDGMFLGYYKRPEVTAGVFDADGFYMTGDIVAELAHDNIEIIDRRNNVLKLSQGEFVAVATLEAEYANSPVVHQIYVYGSSERSYLLAVVVPTPEAVAAAKGDAAALKTTIADSLQDIAKEIQLQSYEVPRDFIIEPQPFTQGNGLLTGIAKLARPNLKAHYGPRLEQMYAEIAEQQAAELRALHGVDPDKPALETVLKAAQALLGVSSAELAADAHFTDLGGDSLSALSFSDLLRDIFAVEVPVGVIVSAANDLSGVAKFVDEQRYSGGTRPTAETVHGAGHTEIRAADLTLDKFIDEATLHAAPSLPKAVGIPHTVLLTGSNGYLGHYLALEWLERLDKTEGKLIAIVRGKNAEAAYRRLEEAFDTGDTQLLAHFRSLADKHLEVLAGDIGDPNLGLDADTWQRLADTVDVIVHPAALVNHVLPYSQLFGPNVVGTAEIIKLAITTKIKPVTYLSTVAVAAYVDPTTFDEESDIRLISAVRPVDELYANGYGNSKWAGEVLLREAHDLCGLPVAVFRSDMILAHSRYTGQLNVPDQFTRLILSLIATGIAPGSFYQAHATGERPLAHYDGLPGDFTAEAITTLGTQVVDSYETYDCVNPHADGVSLDNFVDWLIEAGYPIARIDNYTEWFTRFDTAIRSLPEKQKQHSLLPLLHAFEQPSAAENHGVVPAKRFQHAVQAAGIGPAGQDGTTDIPHLSRRLIVKYAKDLEQLGLL

SEQ ID NO: 86 - DNA, 3555 bp, Mycobacterium abscessus
atgaccgtgaccaacgaaaccaacccacagcaggagcagctatcccgccgtattgaaagtctgcgcgaaagcgatccgcagttccgggcggcccagcccgacccggcggtcgccgaacaggtgctgcgcccgggcctgcatctttctgaagccattgcggcgttgatgactggatacgctgagcgcccggcgctcggtgagcgcgcacgcgagttggtcaccgaccaggatggccgcaccacgctgcgcctgttgccacgcttcgacaccaccacatacggcgaattatggtcccgcacaacatcagtcgccgctgcatggcaccacgacgccgcccacccggttaaggccggcgatctggtggccaccctgggattcaccagcatcgactacaccgtgctggatctggcgatcatgatcctcggtggcgtggcggttccgctacagaccagcgccccggcttcgcagtggacgaccattctggccgaagcggaacccaacactcttgcggtaagcatcgaattgatcggcgctgcaatggaatctgtgcgggccacgccttccatcaagcaggtcgtcgtgttcgactacacccccgaggtcgatgatcaacgggaggcattcgaggcagcaagcacacaactcgccggcaccggcatcgccattgagaccctcgatgccgtcatcgcccgcggcgccgcacttccggccgcaccgctctacgcaccatcggccggcgacgatccgctggcgctgctcatctacacctccggcagcaccggggctccaaagggcgccatgcacagcgaaaacatcgtgcgccgctggtggattcgtgaggacgtcatggccggcaccgagaacctgcccatgatcgggctgaacttcatgccgatgagtcacatcatgggacgcggcaccctcacctccaccctgtctaccggtggaaccggatacttcgcggcgtccagtgacatgtcaacgctcttcgaggacatggagctgatccgcccgacggccctggccttggttccacgcgtgtgcgacatggtgttccagcgattccagaccgaggtggaccggcgtctggcgagcagcgacaccgccagtgccgaggccgttgcggccgaggtcaaggccgatatccgtgacaacctcttcggtggccgcgtatcggcggtcatggtcggttctgctccgttgtccgaggagctgggtgagttcatcgaatcctgcttcgagctgaatctgaccgatggctacggctccaccgaagccggcatggtgttccgcgacggcatcgtgcaacgcccgccggtcattgactacaagctggttgacgtgcccgaactgggctacttctccaccgacaagccgcacccgcgcggtgagctgctgctgaagaccgacggcatgttcctcgggtactacaaacgccccgaggtgactgccggcgtcttcgacgcggacggtttttacatgaccggcgacatcgtcgccgagctggcccacgacaacatcgagatcatcgatcgccgcaacaacgtgctcaaactctcacagggagagtttgtcgcggtcgccaccttggaggccgagtacgccaatagccctgtggtgcaccagatctacgtctacggcagcagcgaacggtcctacctgctagcagtcgtggtgccgacgccggaggccgtggccgccgccaagggcgacgcggcggcactcaagacgaccatcgcggactcgctgcaggacattgccaaggagatccagctgcagtcctacgaagtcccccgtgacttcatcatcgaaccgcagccattcacccagggcaacggcctgctgacgggtatcgccaagctggcgcgtccgaacctgaaggcgcactatggaccgcggctggagcagatgtacgccgaaatcgccgagcagcaggctgccgagcttcgggcgttgcacggagtggacccagacaagcccgcgctggaaacggtcctcaaggcggcgcaggccctgctcggcgtctcgtcggccgaactggccgcggacgcgcatttcaccgatctaggtggcgattcgctgtccgcactgtccttctcggatctgctgcgcgatatcttcgcggtcgaagtaccggtcggagtcatcgtcagtgccgcaaacgatctcagcggtgttgcgaaatttgttgatgaacaacgctattcgggcgggacgcggccgaccgcggagacggtgcacggcgccgggcatacggagatccgggccgcggacctgaccctggataagttcatcgacgaggccaccctgcatgcggcaccgtcgcttccgaaggccgtcgggatcccacacaccgtcctgctcaccgggtccaacggctacctgggccactacctggcactggaatggcttgagcgcctggacaagacagaaggcaagctgatcgccatcgtccgcggtaagaatgccgaggccgcctaccgccgcctcgaggaagccttcgacaccggcgacacgcagctgttggcgcacttccggtcgctggccgacaagcacctcgaagtactggccggcgatatcggcgaccccaaccttggcctggatgccgacacctggcagcgcctggccgacaccgtcgacgtcatcgtgcaccccgccgccctggtcaaccacgtactgccctacagccagctgttcggaccgaatgtcgtcggcaccgccgagatcatcaagctggccatcactaccaagatcaagccggtcacctacctgtccacggtcgcggtcgcggcatatgtcgatccgacgacattcgacgaagagtccgatatccggctcatcagcgcggtgcgtcccgtggacgagctgtacgcgaacggctacggcaacagcaagtgggccggcgaggtactgctgcgcgaagcccacgatctgtgcggactacccgtcgcggtcttccgctccgacatgatcttggcccacagccgctacaccggacagctcaacgtgcccgaccagttcacccgactaatcctcagcctcatcgccaccggaatcgcacccggctccttctaccaagcacacgccaccggcgaacgcccactcgcccactacgacgggctacccggtgacttcaccgccgaggcgatcaccacgttgggcacccaggtggtcgacagctacgagacctacgactgcgtgaacccgcatgcagacggagtctcgctggacaacttcgtcgactggctcatcgaagccggctaccccatcgcacgcatcgacaactacaccgaatggttcacccgcttcgacaccgccatccgaagcctccccgaaaaacagaaacaacactccctactaccactgctccacgcattcgaacagccgtccgccgccgagaaccacggcgtcgtcccggcaaagcgtttccagcacgctgtgcaggccgccggaatcggtccggccgggcaagacggcactaccgacattccccacctgtcgcggcggctgatcgtgaaatacgccaaggacctcgaacagctcggactcctatga

SEQ ID NO: 87 - protein, 1183 aa, Mycobacterium abscessus
MTIDATADNTKEARRQRLGDRIRRLFTDDEQFRAAKPDTAVDTAVAQPGLRLAQVVATIMNGYADRPALGHRVQELVADAAGRSTLRPLPEFETVTYGELWGMARALASTWYHDPAAPVRAGDFVAMLGFTSVDYTAVDLACIHLGAVAVPLQTSASASNWTAILAESEPAVLAVSAELLDTAMESVLATPSLRHITVFDYHPGVDVQRESLESAQHRIAEAGLPISVDPIPLAIGHGRALPDAPLFTAEEGTDPLALVIYTSGSTGTPKGATYSEKMVAKPWLRADTLSSKAEIPLINLNFMPMSHVMGRGSLVTALACGGLAYFAASSDMSTLFEDITLTRPTVVTLVPRVCDMLFQRYRNEVERRTGLDPAADLATLDADVKTDIRENLFGGRVLTIVCGSAPLSEELAAFIESCLDARITDGYGSTEAGVIVRNGRIQRPPVIDYKLVDVPELGYFSTDKPHPRGELLVKAESVFGGYFKRPDVTADVFDPDGYYKTGDIVAELEPDKIQIVDRRNNVIKLSQGEFVAIANLEAEFANSPLVHQICVYGSSERSYLLAVVVPTAEAYEQSGGDEDLLKRLIADSLAQVAREAQLQSYEVPRDFLLETEPFTAANGLLTGIAKLARPKLHEKYGARLEQLYSDIAAAQALELQALHSAGHEDKPVLDTVQRAVTALLGLSAAEVSPDAHFIDLGGDSLSALAFSDLLRDIFTVEVPVGDIVSAANDLTAIARIVERHREADGHSVTPTAESVHGAGHREIRAADLTLDKFIDADTLRAAPALSTFTGTPHTVLLTGANGYLGRFLALEWLERLDKTDGKLIAIVRGKNAEAAYRRLEEAFDTGDTQLLAHFRSLADKHLEVLAGDIGDPNLGLDADTWQRLAETVDVIVHPAALVNHVLPYSQLFGPNVVGTAEIIKLALTTKIKPITYLSTVAVAISVDPKVFDEDSDIRTISAVRPINDGYANGYGNAKWAGEVLLREAHDLCGLPVAVFRSDMILAHSRYTGQLNVPDQFTRLILSLIATGVAPGSFYQAHATGERPLAHYDGLPADFTASAITALGPIEEFHTYDSVNPHADGISLDNFVDWLIEAGYPIARIDNYTEWFTRFDTAIRSLPEKQKQHSLLPLLHAYRHPQHPHNGAFLPAIRFSEGVQAHLNADIPHLTRELIAKYAADLKQLGLL

SEQ ID NO: 88 - DNA, 3552 bp, Mycobacterium abscessus
atgacgatcgacgccaccgcggacaacaccaaggaagcacgtcgtcagcggttaggcgaccgcatcaggcgcctattcaccgacgatgagcagttccgtgccgccaagcccgataccgcggttgataccgccgtcgcccagcctggtctgcgtctcgcccaggtggtcgccacgatcatgaacgggtacgcggaccgtccggcgctcgggcaccgagtccaggagctcgtcgccgacgccgccggccgttcgacgctgcgcccgttgcccgagttcgagacggtcacctacggagagctgtggggcatggcccgcgcgttggcctccacctggtaccacgatcccgccgctccggtacgggccggggacttcgtcgcgatgctcggcttcaccagcgtggactacaccgctgtcgacttggcatgcatccaccttggcgcggtggcggttccattgcagaccagcgcatcggcatccaactggaccgcgatcctggccgaatcggaacctgccgtcctggcggtaagcgccgagttgctcgatacggcaatggaatcggtgctcgccacgccgtcgctgcggcacatcaccgtctttgactatcatcccggtgtcgacgtgcagcgcgaaagtctcgaatccgcacagcaccggatcgccgaggccggcctgccgatttcggtagacccgatacccctggcgatcgggcacgggcgcgccttgccggatgcgccgttgttcaccgcagaggagggtaccgacccgctggccctggtgatctacacctcgggaagcaccggaactcccaagggcgccacctatagcgaaaagatggtcgccaagccctggctgcgggccgacacgttgagctctaaggccgaaattcctttgatcaacctgaatttcatgccaatgagccatgtgatgggacgcggtagtctggtcactgccctggcctgcggcggcctggcttactttgccgcgtccagcgacatgtccacgctgttcgaagacatcacgcttacgcgccccaccgtggtgacactcgtgccccgtgtgtgcgacatgcttttccagcgctaccgcaacgaggttgaacgccgtaccgggcttgatccggcggccgacctggccacccttgatgccgatgtcaagaccgatatccgcgaaaacctgttcggcgggcgtgttctgacaatcgtgtgcggctctgccccactgtccgaggaactggccgccttcatcgaatcctgcctcgatgcccgtatcaccgatggctacggctccaccgaggcgggcgtcatcgtgcgcaacggccgcattcagcgcccgcccgtcatcgactacaagctggtcgacgtgcctgagctcggttacttctccaccgacaagccgcacccgcgcggcgagctgctcgtgaaagccgaatcggtgttcggcggctacttcaaacgccccgacgtcaccgccgacgtattcgatcccgacgggtactacaagaccggggacatcgtcgccgagctcgagcccgacaagatccagatcgtggaccggcgcaacaacgtgatcaagctgtcccagggtgagttcgtggcgatcgccaacctggaagccgagttcgccaatagtccactggtgcatcagatctgcgtctacggcagcagcgagcggtcgtatctgctagcggtggtcgtgccgaccgctgaggcatatgaacaaagcggtggagatgaggatctactcaaacgcctgatcgcggactctctcgcgcaggttgcccgcgaggcccaactgcagtcctacgaggtaccgcgcgacttcctgctggagaccgaaccgttcaccgctgccaacggcctactgaccggcatcgcgaagctggcccgaccgaagctccatgagaagtacggcgcccgcctggagcagctgtactccgatatcgccgccgcccaggcgcttgagctgcaagcactgcactctgccggacatgaggacaagcctgtcctggataccgtgcaacgcgcggtcacggcgttgttggggctgtcggcggccgaggtgagcccagacgcgcatttcatcgaccttggtggcgattcactatccgcccttgccttctcggacctgctgcgcgatatcttcactgtggaggttccggttggcgatatcgtcagcgccgccaacgatctgaccgctatcgcacgcatcgtggaaagacaccgggaagcagacggtcattcggtaactcccaccgccgaatccgtgcacggtgccgggcaccgcgagatccgggccgcggacctgacgctggacaagttcatcgacgcggacaccctgcgcgcggccccggcactgtccacattcaccggcaccccgcacacggtgctgctcaccggcgccaacggctacctggggcggttcctggccctggaatggcttgagcgcctggacaagacagacggcaagctgatcgccatcgtccgcggtaagaatgccgaggccgcctaccgccgcctggaggaagccttcgacaccggcgacacgcagctgttggcgcacttccggtcgctggccgacaagcacctcgaagtactggccggcgatatcggcgaccccaaccttggcctggatgccgacacctggcagcgcctggccgagaccgtcgacgtcatcgtgcaccccgccgccctggtcaaccacgtactgccctacagccagctgttcggacccaatgtcgttggcaccgccgaaatcatcaagctggcactcaccaccaagatcaagcccatcacctacctctccacagtggccgtggcaatctcggtggaccccaaggtattcgatgaagactccgacatccgcacgatcagcgcggtacgaccaatcaacgacggctacgccaacggatacggcaacgcgaaatgggctggcgaggtactgctgcgcgaagcccacgacctgtgcggactacccgtcgcggtcttccgctccgacatgatcttggcccacagccgctacaccggacagctcaacgtgcccgaccagttcacccgactaatcctcagcctcatcgccaccggagtcgcacccggctccttctaccaagcacacgccaccggcgaacgcccactcgcccactacgacggcctgcctgcggatttcacggcatcggccatcaccgccctcgggcccatcgaggagttccacacctacgattcggtgaacccgcatgccgatgggatctcgctggacaacttcgtcgactggctcatcgaagccggctaccccatcgcacgcatcgacaactacaccgaatggttcacccgcttcgacaccgccatccgaagcctccccgaaaaacagaaacaacactccctactaccactactacacgcgtacaggcatccacaacacccacacaacggcgcattcctgcccgcgatcaggttcagtgaaggcgtccaggcccatctgaacgccgacatcccgcacctcacgcgggaactcatcgcgaaatacgcggccgacctgaagcagctcgggttactctag

SEQ ID NO: 89 - protein, 1163 aa, Mycobacterium abscessus
MTAGAAARVAKLFESDPQFRAAMPDPAVMDSLLAPGLRLSQVLHALLSGYAERPVMGFRSRESVVDTATGRTVDRLLPAFETITYGQLLEDISAILAEWQHGDIPMGAGDFIATIGFSSPDYVTLDLATLMNGSVSIPLQHNTSVAQLRMMLEETSPRLVAASADCLDLAVEAAVGLTDLRRVVVFDYRAETDDHREKLATARERLHAAGMDVVVEPLAEVIGRGRDLPEPVLYTAGDDQRTALIMYTSGSTGAPKGAMFTEWTVTRFWSSGAAPNRDTPIINVNFLPLNHLAGRVGLLTAFIPGGTCYFVPESDLSTLFEDWQLARPTHMGVVPRVVDMLFQHYQTRVDALMAGGTDVDTADRLAKTELREDVLGGRVVAGMLATAPLSPEMKAFLESSLDFHLLDLYGLTEVGGVFRDGKISRPPVLDYKLVDVPELGYYTTDKPHPRGELLVKSATATPGYYKRPDVTAEVFDADGYYRTGDVMAEVAPDQLVYVDRRNNVIKLAQGEFVAVANLETVYVGAPLVRQIFVYGNSERAYLLAVVVPTEEALRAHPDPVELKNSIRESLQRTARSNHLHSYELPADFIIETTPFTIESGMLAAVGKPIRPKMIEHYGDRLEQLYVDLAEARVQELRQLRDTAQQRPVLDTVTEAAQALLGMSADAVRPDHHFIDLGGDSLSALTFSNLLRDLFDVEVPVGVITGPAADLRKLAAYIQHEREHSTATAASVHGLDTTVISATELTLDKFIDAETLHNASQLDVPAGAVATVLLTGANGYLGRFLCLEWLQRLSQTGGQLICLVRGDNADQALARLVAAYGDTDRTLLEEFHTLARRHLRVIAADIAQPRFGVDDATWEQLARDVDKIVHPAALVNHVLPYNQLFGPNVFGTAEVIRLALTTRIKPVTYLSTMAVAMTVPDFDEDGDIRTVSPTRHIDPGYANGYANSKWAGEVLLREAHDICGLPVSVFRSDMILTHRRYSGQLNVTDAFTRMLLSLVLTGIAPRSFYQGDGSGARPRAHYEGLPVDFVTEAITSLGLSSSEGFRSYDVMNPHDDGISVDTFVDWLMEDGHSIDIIDNYDEWLSRFETALRGLPDEQRRASVLPLLDAYRIPGNPRRAAATPNHVFRKAVQENNIGGDGADIPQIDRALIAKYIADLRAHRLL

SEQ ID NO: 90 - DNA, 3492 bp, Mycobacterium abscessus
atgacggctggtgcggcggctcgcgttgccaaactgttcgagtccgatccccaattccgggcagccatgccggatccagcggtgatggactcgctgctggcgcccggcctgcgtttatcccaggtactccacgcgttgctcagcggttacgcggagcgcccggtgatgggtttccggtcccgcgagtcggtggtcgacaccgccaccggccgcacggtcgaccggctgctccctgcctttgaaaccatcacctatgggcaactcctggaagacatctcggccatcctcgcggagtggcagcatggcgacattcccatgggcgccggcgacttcatcgccaccatcggcttctccagtcccgactacgtcaccctggatctggccaccctcatgaatggttcggtctcgatcccactgcagcacaacacatctgtggcgcagctgcggatgatgctggaggagaccagcccacgcctggtggcggcgagcgcggactgcctggatctcgcggtcgaggcagctgtcgggcttaccgatctgcgacgggttgtggtgttcgattaccgcgccgagaccgacgatcatcgcgaaaaactggccacggcaagagaacgcttgcacgcggccggtatggacgttgtagtcgaaccgctcgcagaggtgatcgggagaggacgagacctacccgaacccgtgctgtacacggccggggacgatcagcgcacggccctgatcatgtacacctccggtagcaccggcgcgcccaagggggcgatgttcaccgagtggacggtgacccgcttctggtcctcgggcgccgcccccaaccgggacaccccgatcatcaacgtgaacttcctgccgctcaaccaccttgcgggccgggtaggactgctgacggccttcattcccggcggcacatgctacttcgtccccgagagcgatctgtccaccctgttcgaggactggcagctggcacggcccacccatatgggtgtggttccccgtgtcgtcgacatgctcttccagcactaccaaacgcgagtggacgcactgatggccgggggaaccgacgtcgacaccgccgatcggctagccaaaaccgaactgcgcgaagatgtcctgggcgggcgtgtggtcgccggcatgctcgccaccgcgccgttgtcccccgagatgaaggctttcctggagtcctcattggactttcatctgcttgatctgtacggcctgaccgaggtcggcggcgtgttccgagacggcaagatttcccggccgccggtgctcgactacaagctcgtcgatgttcctgagctcgggtactacaccaccgacaagccccatccgcgtggcgaattgctggtcaagagtgccaccgcaacgcccggctactacaagcgtcccgacgtcaccgccgaggtgttcgacgccgatggctactaccgcacgggcgatgtcatggcggaggtcgcgccggaccaattggtgtacgtggacaggcgcaataacgtcatcaagctcgcccagggcgagttcgtcgcggtcgccaatttggaaacggtctatgtgggtgcgccgctggtgcgccagatcttcgtctacggcaacagcgaacgcgcatacctcctcgccgttgtggtgcccaccgaggaagccctgcgggcacacccggaccccgtcgaactgaagaattcgatccgggagtcactgcagcggaccgcccgctccaaccacctgcattcctacgagctgcccgccgacttcattatcgaaaccactccattcacgatcgagagtgggatgcttgcggctgtcggtaagccgatacgtcccaagatgatcgagcactacggcgaccggctcgagcagctctacgtcgacctcgccgaggcacgcgtccaggaactgcggcagctccgcgatacggcgcaacaacgcccggtcctcgataccgtcaccgaggccgcccaggccctcctcggcatgtctgcggacgccgtccgtcccgaccaccacttcatcgacctcggcggagattcgctgtccgcgttgacattctccaatcttcttcgagacctcttcgacgtcgaggttccggtcggtgtgatcaccggcccggcggccgatctgcgcaagctcgccgcttacatccagcacgaacgggagcacagcaccgcgaccgctgccagcgtgcacgggctcgacaccaccgtcatcagcgccaccgaactgacactcgacaagttcatcgacgccgagacactccacaacgcttcgcaactcgacgtgccggcgggcgcggtagctaccgttctgctcaccggcgccaacggatatctcggaagattcctctgcctggagtggctgcaacggctgtcccagacaggtggacaactgatctgcctggtccgcggcgacaacgccgatcaagccctcgcgcgcctcgttgccgcctacggcgacaccgatcgcacactgctcgaggagttccacaccctggctcgacggcacctgcgcgtgatcgccgccgatatcgctcagccgcgcttcggcgtggatgacgccacctgggagcagctggcccgcgatgtcgacaagatcgtgcatccggccgcgctggtcaaccacgtgctgccctacaaccagctgttcggccccaatgtgtttggcacggcggaggttatccggctggccctgaccacccggatcaagccggtgacctatctgtcgacgatggccgtggccatgaccgtgcccgatttcgacgaggacggggacatccgcacggtgagtcccacccggcatatcgaccccggctacgccaacgggtacgccaacagcaaatgggccggcgaggtgctgctgcgggaggcacacgacatatgcggcctgccggtcagcgtgttccggtccgacatgatcctgacgcaccgccgttacagcggacaactcaacgtcaccgacgccttcacccgcatgctgctgagcctggtgctcaccggcatcgcgccgcgaagcttttaccaaggcgatggcagcggtgcccgcccacgcgctcactacgaggggctgccggtcgatttcgtcaccgaagccattaccagcctcggcctgtcctcgtccgagggatttcgctcgtacgacgtcatgaatcctcacgatgacggcatttctgtggacacctttgtcgactggctcatggaagatgggcattccatcgacatcatcgacaactacgacgaatggctgtcccgtttcgagacggcattgcgaggtctgcccgacgagcagcggcgcgcctcagtacttccgctcctcgatgcgtatcggataccgggcaacccgcgccgtgctgccgccacgcccaatcatgtattccggaaagccgtacaggagaacaacatcggaggtgacggcgccgatattccgcaaatcgatcgtgcgctgatcgccaaatacatcgccgatctacgagcacacaggctgctgtga

SEQ ID NO: 91 - protein, 1178 aa, Mycobacterium abscessus
MTETISTAAVPTTDLEEQVKRRIEQVVSNDPQLAALLPEDSVTEAVNEPDLPLVEVIRRLLEGYGDRPALGQRAFEFVTGDDGATVIALKPEYTTVSYRELWERAEAIAAAWHEQGIRDGDFVAQLGFTSTDFASLDVAGLRLGTVSVPLQTGASLQQRNAILEETRPAVFAASIEYLDAAVDSVLATPSVRLLSVFDYHAEVDSQREALEAVRARLESAGRTIVVEALAEALARGRDLPAAPLPSADPDALRLLIYTSGSTGTPKGAMYPQWLVANLWQKKWLTDDVIPSIGVNFMPMSHLAGRLTLMGTLSGGGTAYYIASSDLSTFFEDIALIRPSEVLFVPRVVEMVFQRFQAELDRSLAPGESNSEIAERIKVRIREQDFGGRVLSAGSGSAPLSPEMTEFMESLLQVPLRDGYGSTEAGGVWRDGVLQRPPVTDYKLVDVPELGYFTTDSPHPRGELRLKSETMFPGYYKRPETTADVFDDEGYYKTGDVVAELGPDHLKYLDRVKNVLKLAQGEFVAVSKLEAAYTGSPLVRQIFVYGNSERSFLLAVVVPTPEVLERYADSPDALKPLIQDSLQQVAKDAELQSYEIPRDFIVETVPFTVESGLLSDARKLLRPKLKDHYGERLEALYAELAESQNERLRQLAREAATRPVLETVTDAAAALLGASSSDLAPDVRFIDLGGDSLSALSYSELLRDIFEVDVPVGVINSVANDLAAIARHIEAQRTGAATQPTFASVHGKDATVITAGELTLDKFLDESLLKAAKDVQPATADVKTVLVTGGNGWLGRWLVLDWLERLAPNGGKVYALIRGADAEAARARLDAVYESGDPKLSAHYRQLAQQSLEVIAGDFGDQDLGLSQEVWQKLAKDVDLIVHSGALVNHVLPYSQLFGPNVAGTAEIIKLAISERLKPVTYLSTVGIADQIPVTEFEEDSDVRVMSAERQINDGYANGYGNSKWAGEVLLREAHDLAGLPVRVFRSDMILAHSDYHGQLNVTDVFTRSIQSLLLTGVAPASFYELDADGNRQRAHYDGVPGDFTAASITAIGGVNVVDGYRSFDVFNPHHDGVSMDTFVDWLIDAGYKIARIDDYDQWLARFELALKGLPEQQRQQSVLPLLKMYEKPQPAIDGSALPTAEFSRAVHEAKVGDSGEIPHVTKELILKYASDIQLLGLV

SEQ ID NO: 92 - DNA, 3537 bp, Mycobacterium abscessus
atgactgaaacgatctccacagcggctgtccccactacggatctcgaagagcaggtgaagcgacgcatcgagcaggtcgtgtccaacgatccgcagctggcggcgcttctcccggaagattcggtcaccgaggcggtcaacgagcccgatctaccgctggtcgaggtgatcaggcgactgctggagggctacggtgaccgcccggcactcggccagcgcgccttcgagttcgtcaccggggacgacggtgcgaccgtgatcgcgctgaagcccgaatacaccaccgtctcctaccgcgagttgtgggaacgtgccgaggctatcgctgccgcgtggcacgagcagggcatccgtgacggcgacttcgtcgctcagttgggtttcaccagcacggacttcgcgtcgctcgacgtcgcgggattgcgtctgggcaccgtctcggtgcccctgcagacgggcgcgtcgctgcagcagcgcaacgcgattctcgaagagacccggcccgcagtctttgccgcgagtatcgaataccttgatgccgccgtcgattcggtgcttgcgaccccctcggtgcgactcctctcggttttcgactatcacgcggaggtcgacagccagcgcgaagcgctggaggctgtgcgggcccggcttgagagtgccggccggacgatcgtcgtcgaggccctggcggaggctctcgcgcgggggcgggacctgcccgccgcgccgctgcccagtgcagatcccgatgccttgcgtctgctcatctacacctccggcagcaccggtacccccaagggcgccatgtatccgcaatggctggtcgccaacttgtggcagaagaagtggctcaccgacgatgtgattccgtccataggcgtgaacttcatgcccatgagccacctggcgggtcgcctcactctcatgggcaccctttccggtggcggaaccgcctactacatcgcttcgagcgatctttcgactttcttcgaggacatcgcgctcatccgcccctccgaagtgctcttcgtgccgcgtgtggtggagatggtgttccagcgttttcaggcagaattggaccggtcccttgccccgggtgagagcaactccgagatcgcggagcgaatcaaggtccgcatccgggaacaggacttcggcgggcgtgtgctcagtgctggctccgggtcggccccgttgtctcctgagatgacggagttcatggagtcgctgctgcaggtgccgttgcgcgacgggtatgggtccaccgaggccggtggtgtgtggcgtgacggagtcctgcagcgtccgcccgtcaccgactacaagctggttgacgttccggaactcggatacttcaccacagattcgccgcatccccgtggcgagctgcggttgaagtcggagacgatgttccccggctactacaagcgcccggagaccactgccgatgtcttcgatgacgaggggtactacaagaccggtgacgtggtcgccgagctcgggccggatcacctcaagtacctcgaccgcgtcaagaacgtcctcaagctcgcgcagggagagtttgtcgcggtgtcaaagctggaggccgcttacaccggcagcccgctggtccggcagatctttgtgtacgggaacagtgaacgctcgttcctgctggctgtcgtggtcccgacacccgaagtccttgagcggtacgcagattcgccagatgcgctcaagcccttgatccaggattcgctgcagcaggtcgccaaggacgcggagctgcaatcctatgagataccgcgcgacttcatcgttgagacggtgccgttcaccgtcgagtccggattgctatcggacgcgcgaaagctgctgcgccccaagctgaaggatcactacggagagaggctggaggcgctgtacgccgaactggcggaaagccagaatgagcggctgcgccagttggccagggaggcagccacgcgcccggtcctggagacggtgaccgatgcggccgccgcgctgctgggcgcatcgtcctcggatctggctcctgatgtgcgattcatcgacctcggtggcgactcactgtcggcgctgtcgtactccgagctgctgcgcgacatctttgaggtggacgttccggtgggcgtcatcaacagcgtcgccaacgaccttgccgcgatcgcccggcacatcgaggcgcagcggaccggcgccgctacgcagccgacctttgcgtcggtccacggcaaggacgcgacggtcatcaccgccggtgaactcaccctcgacaagttcttggacgagtcactgttgaaagcggccaaggacgttcagccggcaacggccgatgtcaagaccgttctagtgaccggcggcaacggctggttgggtcgttggctggtgctcgattggctggagcggttggcacccaatggtggcaaggtctacgccctcattcgtggcgccgatgccgaagcagcccgggcacggttggacgccgtgtacgaatcgggtgatcccaagctgtccgcgcattatcgtcagctggcgcaacagagtctggaagttatcgccggcgatttcggcgaccaggatctcggtctatcccaggaagtttggcagaagctggccaaggacgtggacctgatcgtgcactccggtgccttggtgaaccacgtgctgccgtacagccagttgttcggtccgaatgtggcgggtaccgccgagatcatcaagctggcaatttcggagcggctcaagccggtcacctacctgtcgacggtgggcatcgccgaccagattccggtgacggagttcgaggaagactccgatgttcgtgtgatgtcggccgagcgccagatcaatgacggctacgcgaacggatacggcaactcaaaatgggccggcgaggtgctgttgcgggaggctcatgacctagcggggctgccggtgcgtgtgttccgctccgacatgatcctggcgcacagtgactaccacggacagctcaacgtcaccgacgtgttcacccggagcatccagagtctgctgctcaccggtgttgcaccggccagcttctatgaattggatgccgacggcaatcggcagcgcgctcactatgacggtgtgcccggcgatttcaccgccgcatcgatcaccgccatcggcggtgtgaacgtggtagacggttaccgcagcttcgacgtgttcaacccgcaccatgacggtgtctcgatggataccttcgtcgactggctgatcgacgcaggctacaagatcgcgcggatcgacgattacgaccagtggctcgcccggttcgagctggccctcaagggattgcccgagcagcagcggcaacagtcggtgttgccacttctcaagatgtacgagaagccgcaaccggcgatcgacggaagtgcacttccgaccgcagaattcagtcgcgccgtgcacgaggcgaaggtcggagacagcggtgagataccgcacgtcaccaaggagctgatcctcaagtacgccagcgatattcagctgttgggcctggtgtag

SEQ ID NO: 93 - protein, 1148 aa, Streptomyces griseus
MAEPLDAATASAHDPGQGLAEALAAVEPGRALAEVMASVLEGHGDRPALGERAREPETGRLLPHFDTISYRELWSRVRALAGRWHHDPEYPLGPGDRICTLGFTSTDYATLDLACIHLGAVPVPLPSNAPLPRLAPVVEESGPTVLAASVDRLDTAIDVVLASSTIRRLLVFDDGPGATRPGGALAAARQRLSGSPVTVDTLAGLIDRGRDLPPPPLYIPDPGEDPLALLIYTSGSTGAPKGAMYTQRLLGTAWYGFSYGAADTPAISVLYLPQSHLAGRYAVMGSLVKGGTGYFTAADDLSTLFEDIALVRPTELTMVPRLCDMLLQHYRSERDRRADEPGDIEAAVTKAVREDFLGGRVAKAFVGTAPLSAELTAFVESVLGFHLYTGYGSTEAGGVLLDTVVQRPPVTDYKLVDVPELGYYATDLPHPRGELLLKSHTLIPGYYRRPDLTAAIFDADGYYRTGDVFAETGPDRLVYVDRTKDTLKLSQGEFVAVSRLETVLLDSPLVQHLYLYGNSERAYLLAVVVPTPDALAGCGGDTEALRPLLMESLRSVARRAGLNAYEIPRGILVEPEPFSPENGLFTESHKLLRPRLKERYGPALELLYDRLADGQDRRLRELRRTGADRPVQETVLRAAQALLGSPGSDLRPGAHFTDLGGDSLSAVSFSELMKEIFHVDVPVGAIIGPAADLAEVARYITAARRPAGAPRPTPASVHGEHRTEVRAGDLAPEKFLDAPTLAAAPALPRPDGDVRTVLLTGATGYLGRFLCLEWLERLAPSGGRLVCLVRGSDATVAARRLEAAFDSGDTALLRRYRKAAGKTLDVVAGDIGEPLLGLAEETWRELAGAVDLIVHPAALVNHLLPYGELFGPNVVGTAEAIRLALTTRLKPVNHVSTVAVCLGTPAETADENADIRAAVPVRTTGQGYADGYATSKWAGEVLLREAHERYGLPVAVFRSDMVLAHRTYTGQVNVPDVLTRLLLSLVATGIAPGSFYRTDTRAHYDGLPVDFTAEAVVALGAPITEGHRTFNVLNPHDDGVSLDTFVDWLIEAGHPIRRIDDHGAWLTRFTAALRALPEKQRQHSLLPLIGAWAEPGEGAPGPLLPARRFHAAVRAAGVGPERDIPRVSPDLIRKYVTDLRALGLLAGP

SEQ ID NO: 94 - DNA, 3447 bp, Streptomyces griseus
atggccgaaccgctggacgccgccaccgcgtcggcgcacgatccgggccaggggctcgccgaggccctggccgccgtcgaaccgggccgggcgctcgccgaggtcatggcgtccgtcctggagggccacggggaccggcccgccctcggcgaacgggcccgggagccggagaccgggcgtctcctcccgcacttcgacaccatcagctaccgcgaactgtggtcccgcgtccgtgcgctggccggccggtggcaccacgacccggaataccccctgggccccggcgaccggatctgcaccctcggcttcaccagcaccgactacgcgacgctcgacctggcgtgcatccacctgggggccgtgcccgtccccctcccgtccaacgccccgctgccccgactggcgccggtcgtcgaggagtccgggccgacggtactggccgcgagcgtcgaccggctcgacaccgccatcgacgtcgtcctcgcgtcgagcacgatccgccgcctcctcgtcttcgacgacggcccgggggccacccgcccgggcggggcactggcggccgcccgccaacgcctgtccggcagcccggtcaccgtcgacaccctggccggactcatcgaccggggcagggacctgccgcccccgcccctgtacatcccggacccgggggaggacccgctcgccctgctcatctacacctccggcagcaccggcgcgcccaagggcgccatgtacacccaacggctcctgggcaccgcgtggtacgggttcagctacggggcggccgacacccccgcgatcagcgtcctctacctgccgcagagccacctcgcgggccgctacgcggtgatgggatcgctcgtgaaggggggcaccggctacttcaccgctgccgacgacctgtccaccctgttcgaggacatcgccctggtccgccccacggagctgaccatggtcccgcgcctgtgcgacatgctcctccagcactaccggagcgaacgggaccgccgggccgacgaaccgggcgacatcgaggcggcggtcacgaaggcggtgcgggaggacttcctgggcgggcgcgtcgccaaggcgttcgtcggcaccgcgccgctctccgccgaactcacggcgttcgtcgagtccgtcctcggcttccacctctacaccggctacggctccaccgaagccggcggagtgctgctggacacggtggtgcagcgccctccggtcaccgactacaaactggtcgacgtccccgaactgggctactacgcgaccgacctgccccatccgcgcggcgaactgctgctgaagtcccacacgctcatccccggctactaccggcgccccgacctcaccgccgcgatcttcgacgcggacggctactaccgcaccggtgacgtcttcgccgagaccggacccgaccggctggtctacgtcgaccgcacgaaggacaccctgaagctgtcccagggcgagttcgtggccgtgtcccgcctggagaccgtcctcctcgacagccctctcgtccagcacctctacctgtacggcaacagcgagcgcgcctacctcctcgcggtggtggtgcccaccccggacgcgctggccgggtgcggcggggacaccgaggcgctcaggccgctgctcatggaatccctccgcagcgtcgccaggagggccgggctcaacgcgtacgagatcccgcgcggcatcctcgtcgagcccgagcccttcagcccggagaacggcctcttcaccgagagccacaaactgctgcgcccccgcctcaaggagcgctacgggcccgctctggagctgctgtacgaccgactggccgacgggcaggaccgccggctgcgcgagctgcggcgcaccggtgcggaccggccggtgcaggagacggtcctccgggccgcccaggccctgctgggatccccgggctccgacctccggcccggcgcgcacttcaccgacctcggcggggactccctctccgccgtctcgttctccgagctgatgaaggagatcttccacgtcgacgtcccggtcggtgcgatcatcggcccggccgccgacctggcggaggtggcgcggtacatcacggcggcccgtcggccggccggggcaccgcggcccacgcccgcctccgtgcacggggagcaccgcaccgaagtccgcgccggggacctcgccccggagaagttcctcgacgcgcccacgctcgccgccgctccggcgctgccccgccccgacggcgacgtccggacggtcctgctgaccggcgccaccggctacctcggccggttcctctgcctggagtggctggagcggctggcgccctcgggcggacggctggtctgcctcgtccgcggcagcgacgcgaccgtcgcggcgaggcggctggaggcagccttcgacagcggcgacaccgccctgctccggcgctaccggaaggcggccgggaagaccctggacgtggtcgcgggggacatcggcgaaccactgctgggcctggcggaggagacctggcgggaactggccggcgccgtggacctgatcgtgcacccggccgcgctggtcaaccacctgctgccgtacggcgaactgttcggccccaacgtcgtcggcaccgccgaagcgatccggctggcgctcaccacccggctgaagcccgtcaaccacgtctcgaccgtcgcggtctgcctcggcacccccgccgagacggccgacgagaacgccgacatccgggccgccgtcccggtacggaccaccggccaggggtacgccgacggatacgcgaccagcaaatgggccggcgaggtcctcctgcgtgaggcgcacgagcgctatggcctccccgtcgccgtcttccggtccgacatggtcctggcgcaccgcacctacaccggacaggtcaacgtccccgacgtcctcacccggctgctgctcagcctggtcgccaccggcatcgcccccggctcgttctaccgcacggacacccgtgcccactacgacggcctgccggtcgacttcaccgcggaggccgtcgtcgcgctgggcgcaccgatcaccgagggccaccggaccttcaacgtcctcaacccgcacgacgacggcgtttccctggacaccttcgtcgactggctcatcgaggccggccacccgatccggcggatcgacgaccacggtgcctggctcacccgcttcaccgcggcgctccgcgccctgccggagaagcagcggcagcactccctgctcccgctgatcggcgcctgggcggaacccggcgaaggagcccccgggccgctgctccccgcccggcgcttccacgccgccgtccgggcggcgggggtcggccccgagcgggacattccccgggtgtcgccggacctcatccgcaagtacgtcaccgacctgcgcgcactcgggctcctcgccggcccctga

SEQ ID NO: 95 - protein, 1180 aa, Mycobacterium marinum
MSITCVDTRAQRSARRIEQLYSTDAQFAAARPSTAVGIAISKSGLGLPQIIQTVMDGYPQRPALGQRATRVVTDPNTGRSSAQLLAEFETITYRELWNRTNALTNAFAAEALADRGQRVCVLGFASIDYATIDLALMLLGAVSVPLPTNAARAQLCHIVSETQPSLIASSTENLPDAISLVLSHRAPHRVVVFDYRPELDAHREALEAARARLAAIPVTVETLTAIIARGRTVRPAEADCGAQSADAPALLIYTSGSTGAPKGVVYTRNRVADFWRTSKAEVEATEQRTAPSITLNFMPMSHANGRQVLYGTLSNGGTAYFTARSDLSTLFDDLALVRPTELGFPPRIWDMLLERFGREVDRRLRDGTAEGADPGALKARVAADLRQVLLGGRYALAMMGSAPISEQMKASVESLLDLDVMEGYGSTEAGTVIINNEVQRPQVIDYKLVDVAELGYFLTDRPYPRGELLVKTRTLFSGYYRDPEDGAQVFDPDGFYRTGDIMAQVGPDRLAYLDRRNNVLKLSQGEFVAVSRLEAIFANSPLVRQIFVYANGARAYPLAVVVPTQDAQSRHGRAELKAELHTSLHRVAMSAGLAPYEIPRDFIVETTPFTPQNGLLTAIHKLARPHLTQRYGARLELLYTELADSQTRRLHRLRQTGGRLPALETIRRAAGALLGTETTEPRPEAHFKDLGGDSVSAVTFSNLLHDIYGFDVPVGVILGPATDLRALASHVESRRGAGWSGPSFASVHVPRATSVHAGDLKLAKFLDTKTLAAATSLPAADARARTVLLTGATGFLGRYLVLEWLRRLRAVGGKLICLVRAASDEQARVRLDTAFDSGDPQLPEHFRQLAVDRLEVLAGDKSEPGLGLDGPTWQRLADTVDLIVDPATLVNHVLSYRQLFAPNVAGTAELLRLALTTKRKPYAYVSTVSVANQIEPSAFTEDADIREISRTRTIDDSFANGYTTSKWASEVLLREAHDLCGLPVTVFRCDMILADTSYAGQLNLADTFTRLMLSVAATGIAPASFYRLGPDGKRQPAHFDGLPVEFIAEAVATLGARRHDGFQVHHVANPHHDGVGLDEYVDWLVDAGCPIRRIPDYDEWLSRFETALHALPDRKRRHSLLPLLQNYREPAEPIRGGIAPAPRFRGAVRQAKIGRDNDIPHVGPAIIAKYASDLQLLGLA

SEQ ID NO: 96 - DNA, 3543 bp, Mycobacterium marinum
ttgtcaattacctgtgtggatacccgtgcacagcggagcgcccgtcgcatcgagcagctttactccaccgatgcgcaattcgccgccgcccggcccagtacggcggtcggtatcgcaatcagcaagtccgggttgggattaccacagatcattcaaacggtgatggacggatacccgcaacgtccggcacttgggcagcgggcgacgcgcgttgttaccgatccgaataccgggcgtagctcggcgcagctgttggcggagttcgagaccatcacctaccgggagttgtggaaccgcaccaatgcattgaccaacgcattcgccgccgaggcacttgcggatcgcggtcagcgggtctgtgtgctgggattcgcgagcatcgactacgccaccatcgacttggcgctgatgttgctcggcgcggtatcggttccgttgccgacgaatgcggctcgcgcccagctgtgccatatcgtctccgagacccagcccagcctgatcgcctcgagtaccgaaaacctgcccgatgcaatctctttggtgctgtcgcaccgcgcaccacaccgggtggtggtgttcgactaccgccccgaactcgacgcacaccgcgaagccctcgaagccgctcgcgcgcgcctggccgccatcccggtgaccgtcgaaacgctcaccgccatcatcgcgcgcggtcgaacggtgcggccggccgaggccgattgcggcgcccagtccgctgatgcaccggcgcttttgatctatacctccggaagcaccggggcacccaagggcgtcgtctacacccgcaaccgggtggcggacttctggcgcacctcgaaagccgaggtcgaagcgaccgaacaacgaaccgctccttcgatcaccctcaacttcatgccgatgagccacgcgaacggccgccaggtgctctacgggacgctgtccaacggcggcaccgcgtatttcacggcccgcagcgacctctcgacgctcttcgatgatctcgcgttggtccggcccaccgaattgggctttccaccgcgcatttgggacatgctgttggagaggtttgggcgcgaagtcgaccgtcggctccgggacggcacagccgagggcgccgacccgggcgcgctgaaggctcgcgtggcggccgacctacgccaggtgctgctcggcggacggtatgcgctggcgatgatgggctccgcgccaatctccgagcagatgaaagcatccgtcgaatccctgctcgatctggacgtcatggagggctatggctccacggaagccggaacggtcatcatcaacaacgaggttcagcgtccccaggtgatcgactacaagctggtcgacgttgcggaactgggctatttccttaccgaccggccatatccgcggggcgaactgctggtcaaaacgcggacactgttttccggctactaccgggaccccgaagacggcgcccaggtcttcgacccggacggcttctaccggaccggcgacatcatggcccaagtcggccccgatcggctcgcctacctcgaccggcgcaacaacgtgctgaagctgtcgcagggggagttcgtcgcggtctcgcgactagaagcaatatttgccaatagcccgttggtccggcagatcttcgtctatgccaacggtgctcgcgcctacccactggcggtagtcgtgcccacccaggacgcacagtcgcgccacggtcgcgccgaactcaaggccgaactccatacatcgctgcaccgcgttgccatgtcggccggtctggcaccctacgagatcccacgcgacttcattgtcgagacaacccccttcacgccgcagaacggcctgctcaccgcaatccacaagctggcccggccgcacctcacgcagcgctatggcgcacgtctggagctgctgtacaccgagctggccgacagccagacccgccggctgcaccgattgcgccaaaccggtgggcggctgccggcgctcgagaccatcaggcgtgccgccggggcactgttgggcacggagaccaccgagccgcggcccgaggcccacttcaaagatctgggcggggattcggtatcggcggtgacgttctccaacctgctacacgacatctacggtttcgatgttccggtcggtgtgatcctcggcccggcaaccgatttgcgggcgctggccagccacgtcgagagccggcgcggtgccggatggtcggggcccagcttcgcgtcggtgcacgtgccccgggcgacctcggtacacgccggcgacctgaaactggccaagttcctggacaccaagacactcgcagctgccacgagcctgcccgctgccgatgcccgggcacggacggtgctactcaccggcgcaaccggattcctgggacgctacctggtgctggaatggctgcgccggttgcgggccgtcggcggcaagctgatctgtctggtgcgcgccgcgtccgacgaacaagcccgggttcggctggatacggccttcgatagcggcgatccgcagctgcccgagcactttcggcagctcgctgtcgaccgcctggaggtcctcgccggcgataagagcgaaccaggtctcggtctggacggcccaacctggcagcgactggccgacacggtcgacctgatcgtcgaccccgccacgctggtcaaccacgtgctgtcgtaccggcagctgttcgctcccaacgtggcgggcaccgccgagttgctccgcctcgcactcaccaccaaacgcaagccctatgcctacgtctcgaccgtcagcgtggccaaccagatcgaaccgtccgcattcaccgaagacgccgacatccgggagatcagccgcacccgaaccatcgatgacagctttgccaacggctacaccaccagcaagtgggccagcgaggtgctgttgcgtgaggctcacgatctgtgcggactgccggtcacggtctttcgttgcgacatgatcctggcggacaccagctacgccggccagctcaacctcgccgataccttcacccggctgatgctcagtgtggcggccaccgggatcgcgcccgcctcgttctaccggctgggccccgacggcaaacgccagcccgcccacttcgacggattgcccgtcgaattcatcgccgaggcggtggccaccctgggggcgcggcgccacgacgggttccaggtccaccatgtggcgaatccgcaccacgacggcgttgggttggacgagtacgtcgactggctagtcgatgccggttgccccatccggcgcattcccgactatgacgagtggctgagtcgattcgagacggcgctgcacgcgctgccggatcgcaagcgtcgtcattcactgcttccgctgctgcagaactatcgagaacccgccgagccgatccggggcggcatcgcgcccgcaccacggtttcgcggtgcggtacggcaggcgaaaatcggccgcgacaacgacattccccatgtcggcccggcgatcatcgccaagtacgccagcgacctgcagcttctcggcctggcttga

SEQ ID NO: 97 - protein, 1174 aa, Mycobacterium marinum
MSPITREERLERRIQDLYANDPQFAAAKPATAITAAIERPGLPLPQIIETVMTGYADRPALAQRSVEFVTDAGTGHTTLRLLPHFETISYGELWDRISALADVLSTEQTVKPGDRVCLLGFNSVDYATIDMTLARLGAVAVPLQTSAAITQLQPIVAETQPTMIAASVDALADATELALSGQTATRVLVFDHHRQVDAHRAAVESARERLAGSAVVETLAEAIARGDVPRGASAGSAPGTDVSDDSLALLIYTSGSTGAPKGAMYPRRNVATFWRKRTWFEGGYEPSITLNFMPMSHVMGRQILYGTLCNGGTAYFVAKSDLSTLFEDLALVRPTELTFVPRVWDMVFDEFQSEVDRRLVDGADRVALEAQVKAEIRNDVLGGRYTSALTGSAPISDEMKAWVEELLDMHLVEGYGSTEAGMILIDGAIRRPAVLDYKLVDVPDLGYFLTDRPHPRGELLVKTDSLFPGYYQRAEVTADVFDADGFYRTGDIMAEVGPEQFVYLDRRNNVLKLSQGEFVTVSKLEAVFGDSPLVRQIYIYGNSARAYLLAVIVPTQEALDAVPVEELKARLGDSLQEVAKAAGLQSYEIPRDFIIETTPWTLENGLLTGIRKLARPQLKKHYGELLEQIYTDLAHGQADELRSLRQSGADAPVLVTVCRAAAALLGGSASDVQPDAHFTDLGGDSLSALSFTNLLHEIFDIEVPVGVIVSPANDLQALADYVEAARKPGSSRPTFASVHGASNGQVTEVHAGDLSLDKFIDAATLAEAPRLPAANTQVRTVLLTGATGFLGRYLALEWLERMDLVDGKLICLVRAKSDTEARARLDKTFDSGDPELLAHYRALAGDHLEVLAGDKGEADLGLDRQTWQRLADTVDLIVDPAALVNHVLPYSQLFGPNALGTAELLRLALTSKIKPYSYTSTIGVADQIPPSAFTEDADIRVISATRAVDDSYANGYSNSKWAGEVLLREAHDLCGLPVAVFRCDMILADTTWAGQLNVPDMFTRMILSLAATGIAPGSFYELAADGARQRAHYDGLPVEFIAEAISTLGAQSQDGFHTYHVMNPYDDGIGLDEFVDWLNESGCPIQRIADYGDWLQRFETALRALPDRQRHSSLLPLLHNYRQPERPVRGSIAPTDRFRAAVQEAKIGPDKDIPHVGAPIIVKYVSDLRLLGLL

SEQ ID NO: 98 - DNA, 3525 bp, Mycobacterium marinum
atgtcgccaatcacgcgtgaagagcggctcgagcgccgcatccaggacctctacgccaacgacccgcagttcgccgccgccaaacccgccacggcgatcaccgcagcaatcgagcggccgggtctaccgctaccccagatcatcgagaccgtcatgaccggatacgccgatcggccggctctcgctcagcgctcggtcgaattcgtgaccgacgccggcaccggccacaccacgctgcgactgctcccccacttcgaaaccatcagctacggcgagctttgggaccgcatcagcgcactggccgacgtgctcagcaccgaacagacggtgaaaccgggcgaccgggtctgcttgttgggcttcaacagcgtcgactacgccacgatcgacatgactttggcgcggctgggcgcggtggccgtaccactgcagaccagcgcggcgataacccagctgcagccgatcgtcgccgagacccagcccaccatgatcgcggccagcgtcgacgcactcgctgacgccaccgaattggctctgtccggtcagaccgctacccgagtcctggtgttcgaccaccaccggcaggttgacgcacaccgcgcagcggtcgaatccgcccgggagcgcctggccggctcggcggtcgtcgaaaccctggccgaggccatcgcgcgcggcgacgtgccccgcggtgcgtccgccggctcggcgcccggcaccgatgtgtccgacgactcgctcgcgctactgatctacacctcgggcagcacgggtgcgcccaagggcgcgatgtacccccgacgcaacgttgcgaccttctggcgcaagcgcacctggttcgaaggcggctacgagccgtcgatcacgctgaacttcatgccaatgagccacgtcatgggccgccaaatcctgtacggcacgctgtgcaatggcggcaccgcctacttcgtggcgaaaagcgatctctccaccttgttcgaagacctggcgctggtgcggcccaccgagctgaccttcgtgccgcgcgtgtgggacatggtgttcgacgagtttcagagtgaggtcgaccgccgcctggtcgacggcgccgaccgggtcgcgctcgaagcccaggtcaaggccgagatacgcaacgacgtgctcggtggacggtataccagcgcactgaccggctccgcccctatctccgacgagatgaaggcgtgggtcgaggagctgctcgacatgcatctggtcgagggctacggctccaccgaggccgggatgatcctgatcgacggagccattcggcgcccggcggtactcgactacaagctggtcgatgttcccgacctgggttacttcctgaccgaccggccacatccgcggggcgagttgctggtcaagaccgatagtttgttcccgggctactaccagcgagccgaagtcaccgccgacgtgttcgatgctgacggcttctaccggaccggcgacatcatggccgaggtcggccccgaacagttcgtgtacctcgaccgccgcaacaacgtgttgaagctgtcgcagggcgagttcgtcaccgtctccaaactcgaagcggtgtttggcgacagcccactggtacggcagatctacatctacggcaacagcgcccgtgcctacctgttggcggtgatcgtccccacccaggaggcgctggacgccgtgcctgtcgaggagctcaaggcgcggctgggcgactcgctgcaagaggtcgcaaaggccgccggcctgcagtcctacgagatcccgcgcgacttcatcatcgaaacaacaccatggacgctggagaacggcctgctcaccggcatccgcaagttggccaggccgcagctgaaaaagcattacggcgagcttctcgagcagatctacacggacctggcacacggccaggccgacgaactgcgctcgctgcgccaaagcggtgccgatgcgccggtgctggtgacggtgtgccgtgcggcggccgcgctgttgggcggcagcgcctctgacgtccagcccgatgcgcacttcaccgatttgggcggcgactcgctgtcggcgctgtcgttcaccaacctgctgcacgagatcttcgacatcgaagtgccggtgggcgtcatcgtcagccccgccaacgacttgcaggccctggccgactacgtcgaggcggctcgcaaacccggctcgtcacggccgaccttcgcctcggtccacggcgcctcgaatgggcaggtcaccgaggtgcatgccggtgacctgtccctggacaaattcatcgatgccgcaaccctggccgaagctccccggctgcccgccgcaaacacccaagtgcgcaccgtgctgctgaccggcgccaccggcttcctcgggcgctacctggccctggaatggctggagcggatggacctggtcgacggcaaactgatctgcctggtccgggccaagtccgacaccgaagcacgggcgcggctggacaagacgttcgacagcggcgaccccgaactgctggcccactaccgcgcactggccggcgaccacctcgaggtgctcgccggtgacaagggcgaagccgacctcggactggaccggcagacctggcaacgcctggccgacacggtcgacctgatcgtcgaccccgcggccctggtcaaccacgtactgccatacagccagctgttcgggcccaacgcgctgggcaccgccgagctgctgcggctggcgctcacctccaagatcaagccctacagctacacctcgacaatcggtgtcgccgaccagatcccgccgtcggcgttcaccgaggacgccgacatccgggtcatcagcgccacccgcgcggtcgacgacagctacgccaatggctactcgaacagcaagtgggccggcgaggtgctgttgcgcgaggcgcatgacctgtgtggcctgccggttgcggtgttccgctgcgacatgatcctggccgacaccacatgggcgggacagctcaatgtgccggacatgttcacccggatgatcctgagcctggcggccaccggtatcgcgccgggttcgttctatgagcttgcggccgacggcgcccggcaacgcgcccactatgacggtctgcccgtcgagttcatcgccgaggcgatttcgactttgggtgcgcagagccaggatggtttccacacgtatcacgtgatgaacccctacgacgacggcatcggactcgacgagttcgtcgactggctcaacgagtccggttgccccatccagcgcatcgctgactatggcgactggctgcagcgcttcgaaaccgcactgcgcgcactgcccgatcggcagcggcacagctcactgctgccgctgttgcacaactatcggcagccggagcggcccgtccgcgggtcgatcgcccctaccgatcgcttccgggcagcggtgcaagaggccaagatcggccccgacaaagacattccgcacgtcggcgcgccgatcatcgtgaagtacgtcagcgacctgcgcctactcggcctgctctga

SEQ ID NO: 99 - protein, 1174 aa, Mycobacterium leprae
MSTITKQEKQLARRVDDLTANDPQFAAAKPDPAVAAALAQPGLRLPQIIQTALDGYAERPALGQRVAEFTKDPKTGRTSMELLPSFETITYRQLGDRVGALARAWRHDLLHAGYRVCVLGFNSVDYAIIDMALGVIGAVAVPLQTSAAITQLQSIVTETEPSMIATSVNQLPDTVELILSGQAPAKLVVFDYHPEVDEQHDAVATARARLADSSVVVESLTEVLGRGKTLPATPIPVADDSADPLALLIYTSGSTGAPKGAMYLQSNVGKMWRRSDGNWFGPTAASITLNFMPMSHVMGRGILYGTLGNGGTAYFAARSDLSTLLEDLKLVRPTELNFVPRIWETLYDESKRAVDRRLANSGSADRAAIKAEVMDEQRQSLLGGRYIAAMTGSAPTSPELKHGVESLLEMHLLEGYGSTEAGMVLFDGEVQRPPVIDYKLVDVPDLGYFSTDQPYPRGELLLKTQNMFPGYYKRPEVTATVFDSDGYYQTGDIVAEVGPDRLVYVDRRNNVLKLAQGQFVTVAKLEAAFSNSPLVRQIYIYGNSAHPYLLAVVVPTEDALATNDIEVLKPLIIDSLQKVAKEADLQSYEVPRDLIVETTPFSLENGLLTGIRKLAWPKLKQHYGARLEQLYADLVEGQANALHVLKQSVANAPVLQTVSRAVGTILGVATTDLPSNAHFTDLGGDSLSALTFGSLLRELFDIDVPVGVIVSPVNNLVAIADYIERERQGTKRPTFIAIHGRDAGKVHASDLTLDKFIDVSTLTAAPVLAQPGTEVRTVLLTGATGFLGRYLALKWLERMDLVEGKVIALVRAKSNEDARARLDKTFDSGDPKLLAHYQELATDHLEVIAGDKGEVDLELDRQTWRRLADTVDLIVDPAALVNHVLPYSELFGPNTLGTAELIRIALTSKQKPYIYVSTIGVGNQIEPAKFTEDSDIRVISPTRNINNNYANGYGNSKWAGEVLLREAHDLCGLPVTVFRCDMILADTSYAGQLNVPDMFTRMMLSLAATGIAPGSFYELDAESNRQRAHYDGLPVEFIAEAISTLGDQSLHDRDGFTTYHVMNPHDDGIGMDEFVDWLIDAGCPIQRINDYDEWLRRFEISLRALPERQRHSSLLPLLHNYQKPEKPLHGSLAPTIRFRTAVQNANIGQDKDIPHISPAIIAKYVSDLQLLGLV

SEQ ID NO: 100 - DNA, 3525 bp, Mycobacterium leprae
atgtcgactatcactaagcaggaaaagcagctcgcacgccgcgttgacgacctcaccgccaacgacccgcagttcgccgccgccaaacccgacccggcggtagccgccgcccttgcccagcccgggcttcgactgccccaaatcatccagaccgcgctggacggttacgcggagcggccggcactgggccagcgcgtcgccgagttcaccaaagaccctaagaccggacgcacctcgatggagctgctccccagctttgagaccatcacctaccgccagttgggcgaccgtgtcggagcgctggcgcgcgcctggaggcacgacctactgcacgccggctaccgggtctgcgtgctaggtttcaacagtgtcgattacgccatcatcgacatggcgctcggcgtgattggtgctgtggcggttccactgcagaccagtgcggcgatcacccagctgcagtcgatcgtgaccgagaccgaacccagtatgatcgcgacgagcgtaaaccagctgcccgatactgtcgagctgatcctgtctggccaggcgccagcgaagctcgttgtgtttgactaccaccccgaggtcgacgagcagcatgacgcagtggcaaccgcccgggcgcggttggcggacagtagcgtggtggtcgagagcctgaccgaggtcctcggtcgcggcaagacgctgccagctacgccgatccccgtggccgatgactctgctgacccgttggcgttgctgatctacacatctggcagcaccggcgcacccaagggcgcgatgtatctgcaaagcaatgtcggcaagatgtggcgccggtcagacggaaactggttcgggccaaccgccgcgtcaatcactcttaacttcatgccgatgagccacgtcatgggccgcggaatcctctacggcacgctcggtaacggcggcacggcttacttcgccgcccgcagcgacctctcgacgctgctggaggatctcaagctggtgcggccgaccgagttgaactttgtaccgcgcatctgggaaaccctctacgatgaatccaaacgcgcagttgaccgtcggttagccaacagcggctccgccgaccgtgcagccatcaaagccgaagttatggatgaacagcggcaatccctgctgggaggacggtacatcgcggctatgacgggctcggcgccaacctccccggagttgaaacacggggtcgagtccctactcgaaatgcatctgttggaaggctacggctccaccgaagccggcatggtcttgtttgacggcgaagtgcaacgtccgccggttatcgattacaagctggtcgacgttccggatttgggctacttcagcaccgaccagccttatccgagaggtgaattgctgctcaagacccagaacatgttccccggctactacaagcgtcctgaggttaccgccaccgtgttcgacagcgacggttactaccagaccggagacattgtcgccgaagtcggtcccgaccggctcgtgtacgtcgatcgccgcaacaacgtgctgaaactcgcgcagggccagttcgtcaccgtcgcgaaactcgaggcagcgttcagcaatagcccactggtccggcagatctacatctatggcaacagcgcacacccctacctgttggctgttgtggtgccgaccgaggatgcgttggctaccaatgacattgaggtgctcaaaccgctgattatcgattctttacagaaagtagcgaaagaagccgacctgcagtcctacgaggtgccgcgcgacttaatcgtcgagactacaccgttcagcctggagaatggcctgctcaccggtattcgcaagctggcgtggccgaagctcaagcagcactacggcgcgcgactcgaacagctctacgccgatctggttgaaggtcaggcaaatgcactgcacgtgctaaaacaaagcgtggcgaacgctccggtactgcagacggtgagccgagccgtgggcaccattctgggagtggcgaccaccgatttgccgtcgaatgcgcacttcaccgacttaggaggagactcgttgtccgcgctgacattcggtagcctgctacgcgaactcttcgacatcgatgtgccggtgggcgtcattgtcagccctgtcaacaacttggtggcgatcgccgactacatcgagcgcgagcggcagggcacgaagcggcccactttcattgccatacacggtcgtgacgctggcaaagtgcatgccagtgacctcactctagacaaattcatcgatgtatcaacgctgactgccgcgcccgtattggcgcaacccggcaccgaggtgcgcaccgtcctgttgaccggcgctaccggcttcctggggcgctacttggccctgaaatggctcgaacggatggacctggtcgaagggaaggtaatcgctctggtaagagccaagtccaacgaggacgctcgggcccggctcgacaagaccttcgatagcggagaccccaaactgctggcgcactaccaggaactggcaaccgaccacctggaggtcatcgccggcgacaaaggcgaagtagatctggaattggaccggcaaacgtggcgacgactggccgacacggtcgatctgatcgtcgaccccgccgccctggtcaaccacgtgctgccgtacagcgagctattcggccccaatacgttaggcaccgccgagctgattcggatcgcgctgaccagtaagcaaaagccgtacatctatgtgtcgacaatcggcgtcggtaatcagattgagccagcaaaattcaccgaagactccgacatccgagtcattagcccgacgcgcaacatcaacaacaactatgccaacggctacggcaacagcaagtgggccggcgaagtgctgctgcgcgaagctcacgacctatgcggtctgccggtcacggtcttccgctgcgacatgatcttggccgacaccagctatgccggtcagctcaacgtccccgacatgtttactcgaatgatgctgagtctagccgccaccggcatcgcacccggctcgttctacgagctagacgccgagagcaatcggcaacgcgcccactacgacggtctgcccgtcgagttcatcgccgaagcgatctccaccctgggagaccaaagcctgcacgatcgagacgggttcacgacctatcatgtaatgaacccgcacgacgacggcatcggtatggacgagtttgtggactggttaattgatgccggctgccctatacaacgcatcaacgactacgacgaatggctgcgacggtttgagatttcgctgcgcgccctgcccgaaaggcagcgtcacagctcactgttgccgttgttgcacaactaccagaagccggagaagccattgcacgggtcgctggcacccacaatccggttccgtacggccgttcaaaacgcgaacattggtcaggacaaagatattccgcatatctcgccggcaatcatcgccaaatatgtcagcgatctgcagctgctcgggctggtttga

SEQ ID NO: 101 - protein, 1168 aa, Mycobacterium tuberculosis; identical to SEQ ID NO: 43

SEQ ID NO: 102 - DNA, 3507 bp, Mycobacterium tuberculosis; identical to SEQ ID NO: 44

SEQ ID NO: 103 - protein, 1155 aa, Nocardia farcinica
VESTRATRLRQRIAALYADDAQVRDARPDEAISTALREPGLRLRELVATVVDGYRDRPALAARSVQPAVDAATGACVARLLPEYTTMSYGELGLRLRAVAAAWQHDDETRLRPGEFVATLGFTSPDYAVVDLACVWAGAVAVPLQASASVTQLTAILAETAPAILATGLDTLPHAVDCVLAGATPRALHVFDFDPAIDAQRTVYEAACARLAGTGVRVRTLAEVEDRGRALPPAVIDDGPGDDRLALLIYTSGSTGTPKGAMYTERLVALMWLGQPQVAALTVNYLPLSHVAGRLALFGLLARGGTAYFTARADMSTLFEDLALARPTELFVVPRVCEMVLQRFQTERLRRQADDDRVKADLRLELFGDRLLSVVCGSAPLAPELKAFMESVLDLTLHDGYGSTEAGGSVVIDTTVRRPPVLDYRLADVPELGYFRTDKPHPRGELLLKTTTMIPGYYRRPELNAQIFDEDGFYRTGDVVAELAPDRLVYVDRRNNVLKLAQGEFVTIARLEAIFANSPLVRQIFVYGNSERAYLLAVIVPSRQAMAGDPATLKTRIAESLQLIGRDAELEAYEIPRDFLIETEPFTTESGLLSGIGKILRPAVEARYRDRLEQLYADLAAAQQDELAALRREAGQRPVLETVTRAAAAILGGTASDLSPAAHFTDLGGDSLAALALSNLLREIFAVEVPVGVITGPATDLRGLAAHIAAERENRTETPLFDRVHPDQILIRATDLALEKFFDAEELAAAATAAPPVAEPRVVLLTGANGYLGRFLCLEWLERLDRVDGRLICLVRGADEAAALARLEAAFDSGDPELVRRFKELAQRRLTVVAGDIGEPGLGLATATWRRLAAEVEHIVHPAALVNHVLPYRQLFGPNVAGTAEILRLALTERRKPIDFLSTVAVAAQIPADRFAEDGDIRVISPTRTVDRGYANGYGNSKWAAEVLLRAAHDRFDLPVAVFRSDMILAHGSFAGQLNIPDVFTRLLLSLLVTGIAPASFHAATVTGERPRAHYDGLPADFTAAAITALGARTAGFHTYDVLNPHDDGISLDTFVDWLIEAGHPIERIPEHSEWVTRFETALHALPERQRKHSLLPLLHAYRRPVPALRGSALPAAEFRAAVRAAGITADGDIPHLTRALIEKYVADLRLHGLL

SEQ ID NO: 104 - DNA, 3468 bp, Nocardia farcinica
gtggaatccacacgagcgacgcgtctgcggcagcggatcgccgccctgtacgccgacgacgcgcaggtgcgcgacgcgcggccggacgaggcgatcagcacggcgctgcgggaaccgggcctgcggctgcgcgagctcgtcgccaccgtggtcgacggctaccgcgaccggcccgcgctggccgcgcgctcggtgcagccggccgtcgacgccgcgaccggtgcctgcgtggcacggttgctgcccgagtacacgacgatgagttacggcgagctcggcctgcggttgcgcgcggtggccgcggcctggcagcacgacgacgaaacccgccttcgccccggcgaattcgtcgcgaccctgggtttcaccagccccgactacgccgtcgtcgacctggcctgcgtgtgggcgggcgcggtggcggtgccgctgcaggcgagcgcgtcggtgacgcagctgaccgccatcctggccgagaccgcgcccgcaatcctggccaccggcctggacacgctgccgcacgcggtggactgtgtgctcgccggggccacgccacgggcactgcacgtgttcgacttcgaccccgccatcgacgcgcagcgcacggtgtacgaggcggcgtgtgcgcggctggccggtaccggtgtgcgcgtgcgcacgctcgccgaggtcgaggaccgcggccgggcgctgccgcctgccgtgatcgacgacggccccggcgacgaccggctcgccctgttgatctacacctccggcagtaccggcacgcccaagggggcgatgtacaccgagcggctggtcgcgctgatgtggctgggccagccgcaggtcgccgcgctcaccgtcaactacctgccgctcagccacgtcgccgggcggctggcgctgttcgggctgctcgcgcgcggcggcaccgcctacttcaccgcgcgcgccgacatgtccacgctgttcgaggatctggcgctggccaggccgaccgagctgttcgtggtgccgcgcgtgtgcgagatggtgctgcaacgattccagaccgagcggctgcggcgccaggccgacgacgaccgggtcaaggccgacctgcgcctcgaactgttcggcgaccggctgctctcggtggtgtgcggcagcgcgccgctggccccggagctgaaggcgttcatggaatcggtgctcgacctgaccctgcacgacggctacggctccaccgaggcgggcggcagcgtggtcatcgacaccaccgtgcgcaggccgccggtgctggactaccggctcgccgacgtgcccgaactgggctatttccgtaccgacaagccgcatccgcgcggcgagctgctgctcaagaccaccaccatgatccccggctactaccggcggccggagctcaacgcccagatcttcgacgaggacggcttctaccgcaccggcgacgtggtcgcggaactggcgccggaccggctcgtgtacgtcgatcgccgcaacaatgtgctcaagctggcgcagggcgagttcgtcaccatcgcccggctggaggcgatcttcgccaacagtccgctggtgcgccagatcttcgtctacggcaacagcgaacgcgcctatctgctggcggtgatcgtgccgagccgacaggcgatggcgggcgatccggccacgctgaagacgcggatcgcggagtcgttgcagctcatcggccgggacgccgagctggaggcctacgagatcccgcgcgacttcctgatcgagaccgagccgttcaccaccgaatccgggctgctctcgggcatcggcaagatcctgcgtcccgccgtcgaggcgcgctatcgcgaccggctcgaacagctctacgccgacctggccgcggcccagcaggacgagctggcggcgctgcgccgcgaggccgggcagcgtccggtgctcgagaccgtcacccgcgcggccgccgcgatcctcggcggcacggcgagcgacctgagcccggccgcgcacttcaccgatctcggcggcgattcgctggcggcgctggcgctgtcgaacctgctgcgtgagatcttcgccgtcgaggtgccggtcggcgtcatcaccggccccgcgaccgacctccgtggcctggccgcccacatcgccgcggaacgcgaaaaccgcaccgagacaccgctgttcgaccgggtgcatcccgaccagatcctgatccgggccaccgacctcgccctggagaagttcttcgacgccgaggagttggccgccgcggccaccgccgcgccgccggtcgccgagccccgggtggtgctgctgaccggtgccaacggctatctcggccggtttctgtgcctggaatggctggaacggctcgaccgcgtcgacggacggctgatctgcctggtgcgcggcgcggacgaggccgccgcgctggcccgcctggaagccgccttcgacagcggcgatcccgaattggtgcgccgcttcaaggaattggcccagcgcaggctcaccgtggtggccggcgacatcggcgagcccggcctgggcctggccaccgccacgtggcgacggctcgccgccgaggtcgagcacatcgtgcacccggccgcgctggtcaaccacgtgctgccctaccggcagctgttcgggcccaacgtggcgggcaccgcggagatcctgcggctcgcgctcaccgagcggcgcaagccgatcgacttcctgtccacggtcgccgttgccgcgcagatacccgccgaccggttcgccgaggacggcgacatccgcgtgatcagcccgacccgcacggtggaccgcggctacgccaacggctacggcaacagcaaatgggccgccgaggtgttgctgcgtgcggcgcacgaccgcttcgatctcccggtggcggtgttccgctcggacatgatcctggcccacggcagcttcgccggacagctcaacatccccgacgtgttcacccggctgctgctcagcctgctggtcaccggtatcgcgcccgcctcgttccacgccgcgacggtcaccggcgagcgcccgcgcgcccactacgacgggctgcccgcggacttcaccgctgccgcgatcaccgcgctcggggcgcgcaccgcgggattccacacctacgacgtgctcaacccgcacgacgacggcatcagcctggacaccttcgtggactggctgatcgaggccggacatcccatcgaacgcatccccgagcacagcgagtgggtcacccgtttcgagacggcgttgcacgccctgcccgaacgtcagcgcaaacactcgctgctcccgctgttgcacgcctaccgcaggccggtgcccgcgctgcgcggctcggcgctgcccgccgcggagttccgggcggcggtgcgggccgcaggcatcaccgccgacggtgacatcccgcacctgacgcgcgcgctgatcgagaagtacgtcgccgatctccgcctgcacggactgttgtag

SEQ ID NO: 105 - protein, 1174 aa, Nocardia iowensis; identical to SEQ ID NO: 41

SEQ ID NO: 106 - DNA, 3525 bp, Nocardia iowensis; identical to SEQ ID NO: 42

SEQ ID NO: 107 - protein, 1173 aa, Mycobacterium avium
MSTATHDERLDRRVHELIATDPQFAAAQPDPAITAALEQPGLRLPQIIRTVLDGYADRPALGQRVVEFVTDAKTGRTSAQLLPRFETITYSEVAQRVSALGRALSDDAVHPGDRVCVLGFNSVDYATIDMALGAIGAVSVPLQTSAAISSLQPIVAETEPTLIASSVNQLSDAVQLITGAEQAPTRLVVFDYHPQVDDQREAVQDAAARLSSTGVAVQTLAELLERGKDLPAVAEPPADEDSLALLIYTSGSTGAPKGAMYPQSNVGKMWRRGSKNWFGESAASITLNFMPMSHVMGRSILYGTLGNGGTAYFAARSDLSTLLEDLELVRPTELNFVPRIWETLYGEFQRQVERRLSEAGDAGERRAVEAEVLAEQRQYLLGGRFTFAMTGSAPISPELRNWVESLLEMHLMDGYGSTEAGMVLFDGEIQRPPVIDYKLVDVPDLGYFSTDRPHPRGELLLRTENMFPGYYKRAETTAGVFDEDGYYRTGDVFAEIAPDRLVYVDRRNNVLKLAQGEFVTLAKLEAVFGNSPLIRQIYVYGNSAQPYLLAVVVPTEEALASGDPETLKPKIADSLQQVAKEAGLQSYEVPRDFIIETTPFSLENGLLTGIRKLAWPKLKQHYGERLEQMYADLAAGQANELAELRRNGAQAPVLQTVSRAAGAMLGSAASDLSPDAHFTDLGGDSLSALTFGNLLREIFDVDVPVGVIVSPANDLAAIASYIEAERQGSKRPTFASVHGRDATVVRAADLTLDKFLDAETLAAAPNLPKPATEVRTVLLTGATGFLGRYLALEWLERMDMVDGKVIALVRARSDEEARARLDKTFDSGDPKLLAHYQQLAADHLEVIAGDKGEANLGLGQDVWQRLADTVDVIVDPAALVNHVLPYSELFGPNALGTAELIRLALTSKQKPYTYVSTIGVGDQIEPGKFVENADIRQMSATRAINDSYANGYGNSKWAGEVLLREAHDLCGLPVAVFRCDMILADTTYAGQLNLPDMFTRLMLSLVATGIAPGSFYELDADGNRQRAHYDGLPVEFIAAAISTLGSQITDSDTGFQTYHVMNPYDDGVGLDEYVDWLVDAGYSIERIADYSEWLRRFETSLRALPDRQRQYSLLPLLHNYRTPEKPINGSIAPTDVFRAAVQEAKIGPDKDIPHVSPPVIVKYITDLQLLGLL

SEQ ID NO: 108 - DNA, 3522 bp, Mycobacterium avium
atgtcgactgccacccatgacgaacgactcgaccgtcgcgtccacgaactcatcgccaccgacccgcaattcgccgccgcccaacccgacccggcgatcaccgccgccctcgaacagcccgggctgcggctgccgcagatcatccgcaccgtgctcgacggctacgccgaccggccggcgctgggacagcgcgtggtggagttcgtcacggacgccaagaccgggcgcacgtcggcgcagctgctcccccgcttcgagaccatcacgtacagcgaagtagcgcagcgtgtttcggcgctgggccgcgccctgtccgacgacgcggtgcaccccggcgaccgggtgtgcgtgctgggcttcaacagcgtcgactacgccaccatcgacatggcgctgggcgccatcggcgccgtctcggtgccgctgcagaccagcgcggcaatcagctcgctgcagccgatcgtggccgagaccgagcccaccctgatcgcgtccagcgtgaaccagctgtccgacgcggtgcagctgatcaccggcgccgagcaggcgcccacccggctggtggtgttcgactaccacccgcaggtcgacgaccagcgcgaggccgtccaggacgccgcggcgcggctgtccagcaccggcgtggccgtccagacgctggccgagctgctggagcgcggcaaggacctgcccgccgtcgcggagccgcccgccgacgaggactcgctggccctgctgatctacacctccgggtccaccggcgcccccaagggcgcgatgtacccacagagcaacgtcggcaagatgtggcgccgcggcagcaagaactggttcggcgagagcgccgcgtcgatcaccctgaacttcatgccgatgagccacgtgatgggccgaagcatcctctacggcacgctgggcaacggcggcaccgcctacttcgccgcccgcagcgacctgtccaccctgcttgaggacctcgagctggtgcggcccaccgagctcaacttcgtcccgcggatctgggagacgctgtacggcgaattccagcgtcaggtcgagcggcggctctccgaggccggggacgccggcgaacgtcgcgccgtcgaggccgaggtgctggccgagcagcgccagtacctgctgggcgggcggttcaccttcgcgatgacgggctcggcgcccatctcgccggagctgcgcaactgggtcgagtcgctgctcgaaatgcacctgatggacggctacggctccaccgaggccggaatggtgttgttcgacggggagattcagcgcccgccggtgatcgactacaagctggtcgacgtgccggacctgggctacttcagcaccgaccggccgcatccgcgcggcgagctgctgctgcgcaccgagaacatgttcccgggctactacaagcgggccgaaaccaccgcgggcgtcttcgacgaggacggctactaccgcaccggcgacgtgttcgccgagatcgccccggaccggctggtctacgtcgaccgccgcaacaacgtgctcaagctggcgcagggcgaattcgtcacgctggccaagctggaggcggtgttcggcaacagcccgctgatccgccagatctacgtctacggcaacagcgcccagccctacctgctggcggtcgtggtgcccaccgaggaggcgctggcctcgggtgaccccgagacgctcaagcccaagatcgccgactcgctgcagcaggtcgccaaggaggccggcctgcagtcctacgaggtgccgcgcgacttcatcatcgagaccaccccgttcagcctggaaaacggtctgctgaccgggatccggaagctggcgtggccgaaactgaagcagcactacggggaacggctggagcagatgtacgccgacctggccgccggacaggccaacgagctggccgagctgcgccgcaacggtgcccaggcgccggtgttgcagaccgtgagccgcgccgcgggcgccatgctgggttcggccgcctccgacctgtcccccgacgcccacttcaccgatctgggcggagactcgttgtcggcgttgacattcggcaacctgctgcgcgagatcttcgacgtcgacgtgccggtaggcgtgatcgtcagcccggccaacgacctggcggccatcgcgagctacatcgaggccgagcggcagggcagcaagcgcccgacgttcgcctcggtgcacggccgggacgcgaccgtggtgcgcgccgccgacctgacgctggacaagttcctcgacgccgagacgctggccgccgcgccgaacctgcccaagccggccaccgaggtgcgcaccgtgctgctgaccggcgccaccggcttcctgggccgctacctggccctggaatggctggagcggatggacatggtggacggcaaggtcatcgccctggtccgggcccgctccgacgaggaggcacgcgcccggctggacaagaccttcgacagcggcgacccgaaactgctcgcgcactaccagcagctggccgccgatcacctggaggtcatcgccggcgacaagggcgaggccaatctgggcctgggccaagacgtttggcaacgactggccgacacggtcgacgtgatcgtcgaccccgccgcgctggtcaaccacgtgttgccgtacagcgagctgttcgggcccaacgccctgggcaccgcggagctgatccggctggcgctgacgtccaagcagaagccgtacacctacgtgtccaccatcggcgtgggcgaccagatcgagccgggcaagttcgtcgagaacgccgacatccggcagatgagcgccacccgggcgatcaacgacagctacgccaacggctatggcaacagcaagtgggccggcgaggtgctgctgcgcgaggcgcacgacctgtgcgggctgcccgtcgcggtgttccgctgcgacatgatcctggccgacaccacgtatgccgggcagctcaacctgccggacatgttcacccggctgatgctgagcctggtggccaccgggatcgcgcccggctcgttctacgagctcgacgccgacggcaaccggcagcgggcgcactacgacggcctgccggtcgagttcatcgccgcggcgatctcgacgctgggttcgcagatcaccgacagcgacaccggcttccagacctaccacgtgatgaacccctacgatgacggcgtcggtctggacgagtacgtcgattggctggtggacgccggctattcgatcgagcggatcgccgactactccgaatggctgcggcggttcgagacctcgctgcgggccctgccggaccggcagcgccagtactcgctgctgccgctgctgcacaactaccgcacgccggagaagccgatcaacgggtcgatagctcccaccgacgtgttccgggcagcggtgcaggaggcgaaaatcggccccgacaaagacattccgcacgtgtcgccgccggtcatcgtcaagtacatcaccgacctgcagctgctcgggctgctctga

SEQ ID NO: 109 - protein, 1168 aa, Mycobacterium tuberculosis
MSINDQRLTRRVEDLYASDAQFAAASPNEAITQAIDQPGVALPQLIRMVMEGYADRPALGQRALRFVTDPDSGRTMVELLPRFETITYRELWARAGTLATALSAEPAIRPGDRVCVLGFNSVDYTTIDIALIRLGAVSVPLQTSAPVTGLRPIVTETEPTMIATSIDNLGDAVEVLAGHAPARLVVFDYHGKVDTHREAVEAARARLAGSVTIDTLAELIERGRALPATPIADSADDALALLIYTSGSTGAPKGAMYRESQVMSFWRKSSGWFEPSGYPSITLNFMPMSHVGGRQVLYGTLSNGGTAYFVAKSDLSTLFEDLALVRPTELCFVPRIWDMVFAEFHSEVDRRLVDGADRAALEAQVKAELRENVLGGRFVMALTGSAPISAEMTAWVESLLADVHLVEGYGSTEAGMVLNDGMVRRPAVIDYKLVDVPELGYFGTDQPYPRGELLVKTQTMFPGYYQRPDVTAEVFDPDGFYRTGDIMAKVGPDQFVYLDRRNNVLKLSQGEFIAVSKLEAVFGDSPLVRQIFIYGNSARAYPLAVVVPSGDALSRHGIENLKPVISESLQEVARAAGLQSYEIPRDFIIETTPFTLENGLLTGIRKLARPQLKKFYGERLERLYTELADSQSNELRELRQSGPDAPVLPTLCRAAAALLGSTAADVRPDAHFADLGGDSLSALSLANLLHEIFGVDVPVGVIVSPASDLRALADHIEAARTGVRRPSFASIHGRSATEVHASDLTLDKFIDAATLAAAPNLPAPSAQVRTVLLTGATGFLGRYLALEWLDRMDLVNGKLICLVRARSDEEAQARLDATFDSGDPYLVRHYRELGAGRLEVLAGDKGEADLGLDRVTWQRLADTVDLIVDPAALVNHVLPYSQLFGPNAAGTAELLRLALTGKRKPYIYTSTIAVGEQIRPEAFTEDADIRAISPTRRIDDSYANGYANSKWAGEVLLREAHEQCGLPVTVFRCDMILADTSYTGQLNLPDMFTRLMLSLAATGIAPGSFYELDAHGNRQRAHYDGLPVEFVAEAICTLGTHSPDRFVTYHVMNPYDDGIGLDEFVDWLNSPTSGSGCTIQRIADYGEWLQRFETSLRALPDRQRHASLLPLLHNYREPAKPICGSIAPTDQFRAAVQEAKIGPDKDIPHLTAAIIAKYISNLRLLGLL

SEQ ID NO: 110 - DNA, 3507 bp, Mycobacterium tuberculosis
atgtcgatcaacgatcagcgactgacacgccgcgtcgaggacctatacgccagcgacgcccagttcgccgccgccagtcccaacgaggcgatcacccaggcgatcgaccagcccggggtcgcgcttccacagctcatccgtatggtcatggagggctacgccgatcggccggcactcggccagcgtgcgctccgcttcgtcaccgaccccgacagcggccgcaccatggtcgagctactgccgcggttcgagaccatcacctaccgcgaactgtgggcccgcgccggcacattggccaccgcgttgagcgctgagcccgcgatccggccgggcgaccgggtttgcgtgctgggcttcaacagcgtcgactacacaaccatcgacatcgcgctgatccggttgggcgccgtgtcggttccactgcagaccagtgcgccggtcaccgggttgcgcccgatcgtcaccgagaccgagccgacgatgatcgccaccagcatcgacaatcttggcgacgccgtcgaagtgctggccggtcacgccccggcccggctggtcgtattcgattaccacggcaaggttgacacccaccgcgaggccgtcgaagccgcccgagctcggttggccggctcggtgaccatcgacacacttgccgaactgatcgaacgcggcagggcgctgccggccacacccattgccgacagcgccgacgacgcgctggcgctgctgatttacacctcgggtagtaccggcgcacccaaaggcgccatgtatcgcgagagccaggtgatgagcttctggcgcaagtcgagtggctggttcgagccgagcggttacccctcgatcacgctgaacttcatgccgatgagccacgtcgggggccgtcaggtgctctacgggacgctttccaacggcggtaccgcctacttcgtcgccaagagcgacctgtcgacgctgttcgaggacctcgccctggtgcggcccacagaattgtgcttcgtgccgcgcatctgggacatggtgttcgcagagttccacagcgaggtcgaccgccgcttggtggacggcgccgatcgagcggcgctggaagcgcaggtgaaggccgagctgcgggagaacgtgctcggcggacggtttgtcatggcgctgaccggttccgcgccgatctccgctgagatgacggcgtgggtcgagtccctgctggccgacgtgcatttggtggagggttacggctccaccgaggccgggatggtcctgaacgacggcatggtgcggcgccccgcggtgatcgactacaagctggtcgacgtgcccgagctgggctacttcggcaccgatcagccctacccccggggcgagctgctggtcaagacgcaaaccatgttccccggctactaccagcgcccggatgtcaccgccgaggtgttcgaccccgacggcttctaccggaccggggacatcatggccaaagtaggccccgaccagttcgtctacctcgaccgccgcaacaacgtgctaaagctctcccagggcgagttcatcgccgtgtcgaagctcgaggcggtgttcggcgacagcccgctggtccgacagatcttcatctacggcaacagtgcccgggcctacccgctggcggtggttgtcccgtccggggacgcgctttctcgccatggcatcgagaatctcaagcccgtgatcagcgagtccctgcaggaggtagcgagggcggccggcctgcaatcctacgagattccacgcgacttcatcatcgaaaccacgccgttcaccctggagaacggcctgctcaccggcatccgcaagctggcacgcccgcagttgaagaagttctatggcgaacgtctcgagcggctctataccgagctggccgatagccaatccaacgagctgcgcgagctgcggcaaagcggtcccgatgcgccggtgcttccgacgctgtgccgtgccgcggctgcgttgctgggctctaccgctgcggatgtgcggccggacgcgcacttcgccgacctgggtggtgactcgctctcggcgctgtcgttggccaacctgctgcacgagatcttcggcgtcgacgtgccggtgggtgtcattgtcagcccggcaagcgacctgcgggccctggccgaccacatcgaagcagcgcgcaccggcgtcaggcgacccagcttcgcctcgatacacggtcgctccgcgacggaagtgcacgccagcgacctcacgctggacaagttcatcgacgctgccaccttggccgcagccccgaacctgccggcaccgagcgcccaagtgcgcaccgtactgctgaccggcgccaccggctttttgggtcgctacctggcgctggaatggctcgaccgcatggacctggtcaacggcaagctgatctgcctggtccgcgccagatccgacgaggaagcacaagcccggctggacgcgacgttcgatagcggcgacccgtatttggtgcggcactaccgcgaattgggcgccggccgcctcgaggtgctcgccggcgacaagggcgaggccgacctgggcctggaccgggtcacctggcagcggctagccgacacggtggacctgatcgtggaccccgcggccctggtcaaccacgtgctgccgtatagccagctgttcggcccaaacgcggcgggcaccgccgagttgcttcggctggcgctgaccggcaagcgcaagccatacatctacacctcgacgatcgccgtgggcgagcagatccgcccggaggcgttcaccgaggacgccgacatccgggccatcagcccgacccgcaggatcgacgacagctacgccaacggctacgcgaacagcaagtgggccggcgaggtgctgctgcgcgaagctcacgagcagtgcggcctgccggtgacggtcttccgctgcgacatgatcctggccgacaccagctataccggtcagctcaacctgccggacatgttcacccggctgatgctgagcctggccgctaccggcatcgcacccggttcgttctatgagctggatgcgcacggcaatcggcaacgcgcccactatgacggcttgccggtcgaattcgtcgcagaagccatttgcacccttgggacacatagcccggaccgttttgtcacctaccacgtgatgaacccctacgacgacggcatcgggctggacgagttcgtcgactggctcaactccccaactagcgggtccggttgcacgatccagcggatcgccgactacggcgagtggctgcagcggttcgagacttcgctgcgtgccttgccggatcgccagcgccacgcctcgctgctgcccttgctgcacaactaccgagagcctgcaaagccgatatgcgggtcaatcgcgcccaccgaccagttccgcgctgccgtccaagaagcgaaaatcggtccggacaaagacattccgcacctcacggcggcgatcatcgcgaagtacatcagcaacctgcgactgctcgggctgctgtga

SEQ ID NO: 111 - protein, 1168 aa, Mycobacterium bovis
MSINDQRLTRRVEDLYASDAQFAAASPNEAITQAIDQPGVALPQLIRMVMEGYADRPALGQRALRFVTDPDSGRTMVELLPRFETITYRELWARAGTLATALSAEPAIRPGDRVCVLGFNSVDYTTIDIALIRLGAVSVPLQTSAPVTGLRPIVTETEPTMIATSIDNLGDAVEVLAGHAPARLVVFDYHGKVDTHREAVEAARARLAGSVTIDTLAELIERGRALPATPIADSADDALALLIYTSGSTGAPKGAMYRESQVMSFWRKSSGWFEPSGYPSITLNFMPMSHVGGRQVLYGTLSNGGTAYYVAKSDLSTLFEDLALVRPTELCFVPRIWDMVFAEFHSEVDRRLVDGADRAALEAQVKAELRENVLGGRFVMALTGSAPISAEMTAWVESLLADVHLVEGYGSTEAGMVLNDGMVRRPAVIDYKLVDVPELGYFGTDQPYPRGELLVKTQTMFPGYYQRPDVTAEVFDPDGFYRTGDIMAKVGPDQFVYLDRRNNVLKLSQGEFIAVSKLEAVFGDSPLVRQIFIYGNSARAYPLAVVVPSGDALSRHGIENLKPVISESLQEVARAAGLQSYEIPRDFIIETTPFTLENGLLTGIRKLARPQLKKFYGERLERLYTELADSQSNELRELRQSGPDAPVLPTLCRAAAALLGSTAADVRPDAHFADLGGDSLSALSLANLLHEIFGVDVPVGVIVSPASDLRALADHIEAARTGVRRPSFASIHGRSATEVHASDLTLDKFIDAATLAAAPNLPAPSAQVRTVLLTGATGFLGRYLALEWLDRMDLVNGKLICLVRARSDEEAQARLDATFDSGDPYLVRHYRELGAGRLEVLAGDKGEADLGLDRVTWQRLADTVDLIVDPAALVNHVLPYSQLFGPNAAGTAELLRLALTGKRKPYIYTSTIAVGEQIPPEAFTEDADIRAISPTRRIDDSYANGYANSKWAGEVLLREAHEQCGLPVTVFRCDMILADTSYTGQLNLPDMFTRLMLSLAATGIAPGSFYELDAHGNRQRAHYDGLPVEFVAEAICTLGTHSPDRFVTYHVMNPYDDGIGLDEFVDWLNSPTSGSGCTIQRIADYGEWLQRFETSLRALPDRQRHTSLLPLLHNYREPAKPICGSIAPTDQFRAAVQEAKIGPDKDIPHLTAAIIAKYISNLRLLGLL

SEQ ID NO: 112 - DNA, 3507 bp, Mycobacterium bovis
atgtcgatcaacgatcagcgactgacacgccgcgtcgaggacctatacgccagcgacgcccagttcgccgccgccagtcccaacgaggcgatcacccaggcgatcgaccagcccggggtcgcgcttccacagctcatccgtatggtcatggagggctacgccgatcggccggcactcggccagcgtgcgctccgcttcgtcaccgaccccgacagcggccgcaccatggtcgagctactgccgcggttcgagaccatcacctaccgcgaactgtgggcccgcgccggcacattggccaccgcgttgagcgctgagcccgcgatccggccgggcgaccgggtttgcgtgctgggcttcaacagcgtcgactacacaaccatcgacatcgcgctgatccggttgggcgccgtgtcggttccactgcagaccagtgcgccggtcaccgggttgcgcccgatcgtcaccgagaccgagccgacgatgatcgccaccagcatcgacaatcttggcgacgccgtcgaagtgctggccggtcacgccccggcccggctggtcgtattcgattaccacggcaaggttgacacccaccgcgaggccgtcgaagccgcccgagctcggttggccggctcggtgaccatcgacacacttgccgaactgatcgaacgcggcagggcgctgccggccacacccattgccgacagcgccgacgacgcgctggcgctgctgatttacacctcgggtagtaccggcgcacccaaaggcgccatgtatcgcgagagccaggtgatgagcttctggcgcaagtcgagtggctggttcgagccgagcggttacccctcgatcacgctgaacttcatgccgatgagccacgtcgggggccgtcaggtgctctacgggacgctttccaacggcggtaccgcctactacgtcgccaagagcgacctgtcgacgctgttcgaggacctcgccctggtgcggcccacagaattgtgcttcgtgccgcgcatctgggacatggtgttcgcagagttccacagcgaggtcgaccgccgcttggtggacggcgccgatcgagcggcgctggaagcgcaggtgaaggccgagctgcgggagaacgtgctcggcggacggtttgtcatggcgctgaccggttccgcgccgatctccgctgagatgacggcgtgggtcgagtccctgctggccgacgtgcatttggtggagggttacggctccaccgaggccgggatggtcctgaacgacggcatggtgcggcgccccgcggtgatcgactacaagctggtcgacgtgcccgagctgggctacttcggcaccgatcagccctacccccggggcgagctgctggtcaagacgcaaaccatgttccccggctactaccagcgcccggatgtcaccgccgaggtgttcgaccccgacggcttctaccggaccggggacatcatggccaaagtaggccccgaccagttcgtctacctcgaccgccgcaacaacgtgctaaagctctcccagggcgagttcatcgccgtgtcgaagctcgaggcggtgttcggcgacagcccgctggtccgacagatcttcatctacggcaacagtgcccgggcctacccgctggcggtggttgtcccgtccggggacgcgctttctcgccatggcatcgagaatctcaagcccgtgatcagcgagtccctgcaggaggtagcgagggcggccggcctgcaatcctacgagattccacgcgacttcatcatcgaaaccacgccgttcaccctggagaacggcctactcaccggcatccgcaagctggcacgcccgcagttgaagaagttctatggcgaacgtctcgagcggctctataccgagctggccgatagccaatccaacgagctgcgcgagctgcggcaaagcggtcccgatgcgccggtgcttccgacgctgtgccgtgccgcggctgcgttgctgggctctaccgctgcggatgtgcggccggacgcgcacttcgccgacctgggtggtgactcgctctcggcgctgtcgttggccaacctgctgcacgagatcttcggcgtcgacgtgccggtgggtgtcattgtcagcccggcaagcgacctgcgggccctggccgaccacatcgaagcagcgcgcaccggcgtcaggcgacccagcttcgcctcgatacacggtcgctccgcgacggaagtgcacgccagcgacctcacgctggacaagttcatcgacgctgccaccctggccgcagccccgaacctgccggcaccgagcgcccaagtgcgcaccgtactgctgaccggcgccaccggctttttgggtcgctacctggcgctggaatggctcgaccgcatggacctggtcaacggcaagctgatctgcctggtccgcgccagatccgacgaggaagcacaagcccggctggacgcgacgttcgatagcggcgacccgtatttggtgcggcactaccgcgaattgggcgccggccgcctcgaggtgctcgccggcgacaagggcgaggccgacctgggcctggaccgggtcacctggcagcggctagccgacacggtggacctgatcgtggaccccgcggccctggtcaaccacgtgctgccgtatagccagctgttcggcccaaacgcggcgggcaccgccgagttgcttcggctggcgctgaccggcaagcgcaagccatacatctacacctcgacgatcgccgtgggcgagcagatcccgccggaggcgttcaccgaggacgccgacatccgggccatcagcccgacccgcaggatcgacgacagctacgccaacggctacgcgaacagcaagtgggccggcgaggtgctgctgcgcgaagctcacgagcagtgcggcctgccggtgacggtcttccgctgcgacatgatcctggccgacaccagctataccggtcagctcaacctgccggacatgttcacccggctgatgctgagcctggccgctaccggcatcgcacccggttcgttctatgagctggatgcgcacggcaatcggcaacgcgcccactatgacggcttgccggtcgaattcgtcgcagaagccatttgcacccttgggacacatagcccggaccgttttgtcacctaccacgtgatgaacccctacgacgacggcatcgggctggacgagttcgtcgactggctcaactccccaactagcgggtccggttgcacgatccagcggatcgccgactacggcgagtggctgcagcggttcgagacttcgctgcgtgccttgccggatcgccagcgccacacctcgctgctgcccttgctgcacaactaccgagagcctgcaaagccgatatgcgggtcaatcgcgcccaccgaccagttccgcgctgccgtccaagaagcgaaaatcggtccggacaaagacattccgcacctcacggcggcgatcatcgcgaagtacatcagcaacctgcgactgctcgggctgctgtga

SEQ ID NO: 113 - protein, 1188 aa, Mycobacterium leprae
VWRQQSISHRKESVMSTITKQEKQLARRVDDLTANDPQFAAAKPDPAVAAALAQPGLRLPQIIQTALDGYAERPALGQRVAEFTKDPKTGRTSMELLPSFETITYRQLGDRVGALARAWRHDLLHAGYRVCVLGFNSVDYAIIDMALGVIGAVAVPLQTSAAITQLQSIVTETEPSMIATSVNQLPDTVELILSGQAPAKLVVFDYHPEVDEQHDAVATARARLADSSVVVESLTEVLGRGKTLPATPIPVADDSADPLALLIYTSGSTGAPKGAMYLQSNVGKMWRRSDGNWFGPTAASITLNFMPMSHVMGRGILYGTLGNGGTAYFAARSDLSTLLEDLKLVRPTELNFVPRIWETLYDESKRAVDRRLANSGSADRAAIKAEVMDEQRQSLLGGRYIAAMTGSAPTSPELKHGVESLLEMHLLEGYGSTEAGMVLFDGEVQRPPVIDYKLVDVPDLGYFSTDQPYPRGELLLKTQNMFPGYYKRPEVTATVFDSDGYYQTGDIVAEVGPDRLVYVDRRNNVLKLAQGQFVTVAKLEAAFSNSPLVRQIYIYGNSAHPYLLAVVVPTEDALATNDIEVLKPLIIDSLQKVAKEADLQSYEVPRDLIVETTPFSLENGLLTGIRKLAWPKLKQHYGARLEQLYADLVEGQANALHVLKQSVANAPVLQTVSRAVGTILGVATTDLPSNAHFTDLGGDSLSALTFGSLLRELFDIDVPVGVIVSPVNNLVAIADYIERERQGTKRPTFIAIHGRDAGKVHASDLTLDKFIDVSTLTAAPVLAQPGTEVRTVLLTGATGFLGRYLALKWLERMDLVEGKVIALVRAKSNEDARARLDKTFDSGDPKLLAHYQELATDHLEVIAGDKGEVDLELDRQTWRRLADTVDLIVDPAALVNHVLPYSELFGPNTLGTAELIRIALTSKQKPYIYVSTIGVGNQIEPAKFTEDSDIRVISPTRNINNNYANGYGNSKWAGEVLLREAHDLCGLPVTVFRCDMILADTSYAGQLNVPDMFTRMMLSLAATGIAPGSFYELDAESNRQRAHYDGLPVEFIAEAISTLGDQSLHDRDGFTTYHVMNPHDDGIGMDEFVDWLIDAGCPIQRINDYDEWLRRFEISLRALPERQRHSSLLPLLHNYQKPEKPLHGSLAPTIRFRTAVQNANIGQDKDIPHISPAIIAKYVSDLQLLGLV

SEQ ID NO: 114 - DNA, 3567 bp, Mycobacterium leprae
gtgtggcgccaacagtctatttctcatcgcaaggaatctgttatgtcgactatcactaagcaggaaaagcagctcgcacgccgcgttgacgacctcaccgccaacgacccgcagttcgccgccgccaaacccgacccggcggtagccgccgcccttgcccagcccgggcttcgactgccccaaatcatccagaccgcgctggacggttacgcggagcggccggcactgggccagcgcgtcgccgagttcaccaaagaccctaagaccggacgcacctcgatggagctgctccccagctttgagaccatcacctaccgccagttgggcgaccgtgtcggagcgctggcgcgcgcctggaggcacgacctactgcacgccggctaccgggtctgcgtgctaggtttcaacagtgtcgattacgccatcatcgacatggcgctcggcgtgattggtgctgtggcggttccactgcagaccagtgcggcgatcacccagctgcagtcgatcgtgaccgagaccgaacccagtatgatcgcgacgagcgtaaaccagctgcccgatactgtcgagctgatcctgtctggccaggcgccagcgaagctcgttgtgtttgactaccaccccgaggtcgacgagcagcatgacgcagtggcaaccgcccgggcgcggttggcggacagtagcgtggtggtcgagagcctgaccgaggtcctcggtcgcggcaagacgctgccagctacgccgatccccgtggccgatgactctgctgacccgttggcgttgctgatctacacatctggcagcaccggcgcacccaagggcgcgatgtatctgcaaagcaatgtcggcaagatgtggcgccggtcagacggaaactggttcgggccaaccgccgcgtcaatcactcttaacttcatgccgatgagccacgtcatgggccgcggaatcctctacggcacgctcggtaacggcggcacggcttacttcgccgcccgcagcgacctctcgacgctgctggaggatctcaagctggtgcggccgaccgagttgaactttgtaccgcgcatctgggaaaccctctacgatgaatccaaacgcgcagttgaccgtcggttagccaacagcggctccgccgaccgtgcagccatcaaagccgaagttatggatgaacagcggcaatccctgctgggaggacggtacatcgcggctatgacgggctcggcgccaacctccccggagttgaaacacggggtcgagtccctactcgaaatgcatctgttggaaggctacggctccaccgaagccggcatggtcttgtttgacggcgaagtgcaacgtccgccggttatcgattacaagctggtcgacgttccggatttgggctacttcagcaccgaccagccttatccgagaggtgaattgctgctcaagacccagaacatgttccccggctactacaagcgtcctgaggttaccgccaccgtgttcgacagcgacggttactaccagaccggagacattgtcgccgaagtcggtcccgaccggctcgtgtacgtcgatcgccgcaacaacgtgctgaaactcgcgcagggccagttcgtcaccgtcgcgaaactcgaggcagcgttcagcaatagcccactggtccggcagatctacatctatggcaacagcgcacacccctacctgttggctgttgtggtgccgaccgaggatgcgttggctaccaatgacattgaggtgctcaaaccgctgattatcgattctttacagaaagtagcgaaagaagccgacctgcagtcctacgaggtgccgcgcgacttaatcgtcgagactacaccgttcagcctggagaatggcctgctcaccggtattcgcaagctggcgtggccgaagctcaagcagcactacggcgcgcgactcgaacagctctacgccgatctggttgaaggtcaggcaaatgcactgcacgtgctaaaacaaagcgtggcgaacgctccggtactgcagacggtgagccgagccgtgggcaccattctgggagtggcgaccaccgatttgccgtcgaatgcgcacttcaccgacttaggaggagactcgttgtccgcgctgacattcggtagcctgctacgcgaactcttcgacatcgatgtgccggtgggcgtcattgtcagccctgtcaacaacttggtggcgatcgccgactacatcgagcgcgagcggcagggcacgaagcggcccactttcattgccatacacggtcgtgacgctggcaaagtgcatgccagtgacctcactctagacaaattcatcgatgtatcaacgctgactgccgcgcccgtattggcgcaacccggcaccgaggtgcgcaccgtcctgttgaccggcgctaccggcttcctggggcgctacttggccctgaaatggctcgaacggatggacctggtcgaagggaaggtaatcgctctggtaagagccaagtccaacgaggacgctcgggcccggctcgacaagaccttcgatagcggagaccccaaactgctggcgcactaccaggaactggcaaccgaccacctggaggtcatcgccggcgacaaaggcgaagtagatctggaattggaccggcaaacgtggcgacgactggccgacacggtcgatctgatcgtcgaccccgccgccctggtcaaccacgtgctgccgtacagcgagctattcggccccaatacgttaggcaccgccgagctgattcggatcgcgctgaccagtaagcaaaagccgtacatctatgtgtcgacaatcggcgtcggtaatcagattgagccagcaaaattcaccgaagactccgacatccgagtcattagcccgacgcgcaacatcaacaacaactatgccaacggctacggcaacagcaagtgggccggcgaagtgctgctgcgcgaagctcacgacctatgcggtctgccggtcacggtcttccgctgcgacatgatcttggccgacaccagctatgccggtcagctcaacgtccccgacatgtttactcgaatgatgctgagtctagccgccaccggcatcgcacccggctcgttctacgagctagacgccgagagcaatcggcaacgcgcccactacgacggtctgcccgtcgagttcatcgccgaagcgatctccaccctgggagaccaaagcctgcacgatcgagacgggttcacgacctatcatgtaatgaacccgcacgacgacggcatcggtatggacgagtttgtggactggttaattgatgccggctgccctatacaacgcatcaacgactacgacgaatggctgcgacggtttgagatttcgctgcgcgccctgcccgaaaggcagcgtcacagctcactgttgccgttgttgcacaactaccagaagccggagaagccattgcacgggtcgctggcacccacaatccggttccgtacggccgttcaaaacgcgaacattggtcaggacaaagatattccgcatatctcgccggcaatcatcgccaaatatgtcagcgatctgcagctgctcgggctggtttga

SEQ ID NO: 115 - protein, 1271 aa, Dictyostelium discoideum
MLKHIKNFLTRKEERKEKEVEKLKDGVSITEVKQSNLVVYSCNGCGSEIWPPKQERYACNECSNFDLCSECYRKEMILINGTQEEKDKLVSGESNNGIKYEPVRHYDPSPLPHQLTLENETQFQLVYSLRGNSTFETMEKSFKYFKNRPCLGIRERLGEDNVLSERYKWLTYGEVYEKSLTLAKALTNFIERRDFISIYMDNCLEWYFTDFASLWAGLIVVPLHHASNSFNLLEILWNSESKCIVCSGESFKNLIELYDQLTEQDKLEKPIVLKLIVHKEDLFDQSLVDRLPSGVEFKTFNEMIKIGESLSQAKYEFVPVGPNDLSSVTYTSGSTGVPKGVMKLDSIFNLLIVNSYVQFPNAVYSYNTLSHSQRLSDWRYIYMGGRVAIYSGDMNLLFEDLALVRPHSFWAVPRFWNLLFTQFKSDLKQYMFENPQLDERTATLYCYKGIRKLLGDRINNLVTGGAPTANEVLKFMSDCWKDINISNSYGLTEVSGVCIDGYISDEVEFKIEPVPSFGYYPTDLPHPRGELVVKSSTMSAGYYKNTQLTSESFEGGWFKTGDVVELIGVRKVKIIDRIKHAFKLANGEFVTPEPLENNFVSLCINQIFIYGNSLKTFLVAIVKPSQDCLKQLGLQDIPIDQLIENPTLKSKLLSEINKISKEKKLANYEIPKIITIDFTEWTIDNKLITGSGKFNRGELYKFYKIKINNMFDIIDKIQQGLRNNNNNNNNDNINNNDNNNNNESNKDNFENYIKSILNLDGRIEDNNFNLENLSFIQIGGDSLGAVKLSSLLKEKENIDISPSTILNQNFNLSSLSKLINEKESNQSIVEDFKENFKINWNEEMILDEDIKKSIDQIKNAQPSSTPSSSKSTPSQSSSSPPPSLNSNNIGQNAFHMKSIFITGVTGYLGTFLLFNLLEDKSIGIERIYCLVRNVKNEEEGFKLIERIFEKSCINGMNEKIREKVIPVCGDLSKPFFGVSTETFKMLSLAVDMVIHNGAIVNMAYPYANMKSTNVTSTRDILRLCTTGRASFKKLVYVSTVGVFFGNGDEKIDESTAPSTFFLDHGNGYNQTKLISDILVREAASYGLPTMIFRPGTIFSHTQSGFNNQNDSIGLIIKGILGSSSYPTKKDYSSGDLNLSPVDWVSSSMVSLIKHLPFWCNNTKIYHMVNDNRLSLDLLCQYINKEKQLEEINYFDWIDAQLNSSNNPLYSIKHLFKKNDRFPIGSQSIKNPKTIKDLESIGELQCQPISDSTVINYVKYLISNNLIQTINK

SEQ ID NO: 116 - DNA, 3816 bp, Dictyostelium discoideum
atgttaaaacatattaaaaattttttaactagaaaagaagaaagaaaagaaaaagaagtagagaaattaaaagatggagtatcaataactgaggttaaacaatcgaacctagtagtttattcatgcaatggttgtggatcagagatatggccaccaaaacaagagagatatgcatgtaatgaatgctcaaatttcgatttatgtagtgagtgttatagaaaagaaatgatattaataaatggtacacaagaagagaaagataaattagttagtggggagagtaataatggaataaagtacgagccagtgagacattatgatccatcaccattacctcatcaattaacattagagaatgagactcaatttcaattagtttatagtttacgtggtaattcaacatttgaaacaatggagaaatcatttaaatactttaaaaacagaccatgtcttggtattagagagagattaggagaggataatgttttatcagaaagatataaatggttaacatatggtgaagtgtatgagaaatctttaaccttggcaaaggcattaactaatttcatcgaaagaagagatttcatttcaatctatatggataattgcttagaatggtatttcacagattttgcatcattatgggccggattaatagtggtaccattacatcatgcttcaaatagttttaatcttttagagattctttggaattccgaatcaaaatgtatagtttgttctggtgaatcatttaaaaatttaatagaactttatgatcaattgactgagcaagataaattagagaaaccaatagtgttgaaattgatagttcataaggaggatctattcgatcagtcattagtcgatagattgccaagtggcgtagaatttaaaactttcaatgagatgattaaaattggggaatcattaagtcaggctaaatatgaatttgtcccagttggtccaaatgatctttcctcggtgacttatacaagtggtagtactggtgtaccaaaaggtgtaatgaagttagattcaattttcaatttactaattgtcaattcctatgttcaattcccaaatgcagtttatagttataataccctatcacatagtcaacgtttaagtgattggagatatatttatatgggtggtagagtagctatctattcaggtgatatgaatctattatttgaagatttagccttggttagacctcattcattttgggctgtaccaagattttggaatttattattcacccagttcaagagtgatctaaagcaatacatgtttgaaaatccacaattggatgaaagaactgccacactctattgctataaaggtattagaaagttattaggtgatagaattaataatctagtgactggtggtgctccgactgcaaatgaagtactcaaatttatgagtgattgttggaaagatataaacatttcaaattcttatggtttaactgaagtatcaggtgtttgtatagatggttatatctctgacgaagtagaattcaaaattgaaccagtaccttcttttggatattacccaactgatttaccacatcctcgtggtgaattggttgtaaaatcatcaacaatgtctgcaggttattataaaaatactcaattaacttcagaatcatttgaaggtggttggtttaaaactggtgatgtcgtagaattaattggagttagaaaagttaaaatcattgatagaattaaacatgccttcaaattggcaaatggagaattcgttacaccagaaccattggaaaataatttcgtttcactttgtattaatcaaatttttatttatggtaattcacttaaaacatttttagttgcaattgttaaaccatcacaagattgtttaaaacaattaggacttcaagatataccaatcgatcaattaattgaaaatccaactttaaaatcaaaacttttatcagagattaataaaatttcaaaagaaaaaaaactagcaaattatgaaattccaaaaattattacaatagatttcactgaatggacaattgataataaattaatcactggttctggtaaatttaatagaggtgaattatataaattttataaaattaaaattaataatatgtttgatataattgataaaattcaacaaggtttaagaaataataataataataataataatgataatattaataataatgataataataataataatgaatcaaataaagataattttgaaaattatataaaatcaattttaaatttagacggtagaattgaagataataattttaatttagagaatttatcatttattcaaattggtggtgattcgttaggtgctgttaaattatcatcacttttaaaagaaaaagaaaatattgatatttcaccttcaacaattttaaatcaaaattttaatttatcttcattatcgaaattaataaatgaaaaagaatcaaatcaatcaattgttgaagattttaaagaaaattttaaaatcaattggaatgaagagatgattttagatgaagatattaaaaaatcaattgaccaaattaaaaatgcacaaccatcatcaactccctcttcatcaaaatcaacaccatcacaatcatcatcatcaccaccaccatcattaaattcaaataatattggtcaaaatgcttttcatatgaaatcaatatttattacaggtgttacaggttatttaggtacatttttattatttaatttattagaggataaatcaattggtattgagagaatttattgtttagttagaaatgtaaagaatgaagaagaaggttttaaattaattgaaagaatatttgaaaaatcttgtatcaatggtatgaatgaaaagattagagaaaaggtaattccagtttgtggtgacttatcaaaaccatttttcggtgtttctactgaaaccttcaaaatgttatctttagcggtcgatatggtaattcacaatggtgccattgttaatatggcctatccatatgcgaatatgaaatcaacaaatgttacatcaactcgtgatatcctaagattatgcactaccggaagagcctcttttaaaaagttggtctacgtttcaacagttggtgtattctttggaaatggtgatgaaaagatagatgaatcaacagcaccatcaactttctttttagatcatggtaatggttataaccaaacaaaactaatatcagatatacttgttagagaagcggcttcatatggtttaccaacaatgattttcagaccaggtacaatctttagtcatacccaatctggtttcaacaatcaaaatgattcaatcggtttaataattaaaggtatcctaggttcgagttcctatccaactaaaaaagattactctagtggcgatttaaatctttcaccagttgattgggtatcatcttcaatggtttctttaattaagcatcttccattttggtgtaataatacaaaaatttatcatatggtaaatgataatcgtttatctttagatttgctatgtcaatatataaataaagaaaaacaattagaagaaattaattatttcgattggatcgatgctcaacttaattcttcaaataatccattgtattctattaaacatttatttaaaaagaatgatcgtttcccaattggttctcagtcaattaaaaatccaaaaactattaaagatttagaatcaattggtgaacttcaatgtcaaccaatatctgattccacagtaatcaattatgtaaaatatttaatctcaaataatttaattcaaacaattaataaataa

SEQ ID NO: 117 - protein, 1110 aa, Streptomyces rimosus
MTDTYVSSRPLSKRPQVPGARTPAPGYPRDSRIPELFEAQAAALPQAPAARHGDRTLTYGQLDAHADALADRLAAGGVRPGDLIGVCGSRSLEALVALLGILKAGCAYVPLDEELPPARLRAMAEDAGISAAVTLPGSTRRVRGLRVSVEVGSLGRPAPERASGPAPDRATGSAADCAYVAFTSGTTGRPKPVALSHRGVVRLVLSDPGLTPPGPGDGVLHAYSLSSDASTIEIWGALLTGACLVVADREELLSPTALERLLRAGGVTVAYLTTSVFHLVARTRPEALAGLRFVSAGGEAMDPRLANAVLAACPRTTVVNFYGPTENAVVSTAHVLTPLPEDAAHVPLGRPFGASTCHVLRADGSPARPGEEGELYVGGDGLALGYLGDPQLTAERFVTLPAVEPDGPLYRTGDRAVRHADGLLEYRGRLDRQVKLRGARIELDEVETRLRAHPEVGEAAVEVDGHSLTAYVTATVPGRPLPLADLRAYCAKWLPPQAVPALIPLDRFPVTSGGKIDRSRLKPTAPPPGPEDTAEAARRPDEPEATDGLSGLLSEVWHQVLRVRPTPRDDFFLLGGDSLLASETVTRTLAVLGLDAALGSTLIRALLAAPTLESFTAAVRGVRGGTGGPAGGQEPAVDFAAETGLGFALPPAEGPAPNPHDPEDVLLTGASGFVGGFLLHRLLHATAARVHCPVRATSPAHARQRVRTALTRYGLHLDEADWQRVECFPGDLTQPRLGLDHERADALAQRLDLIVHNGARVNFLYPYQQLRPANVDGTREVVRIAARRRVPVHFVSTVAVVAGFGTAGVREVDEDLPPAHADGLTMGYAESKWVAEGVLRQAAAQGLPVAVYRPYEVTGDRTHGACNTETAICSLFKMIADTGVAPDIKLPMDFVPVDHLAESLVHIATHRPADGRVYHLTNPRPAMLSDVLDRMRAAGFTLRTLPYDAWVGELVRHVAENPTSATAPFVSLCVDRSRTADMSVKEMYLKGTFPVLGRRNAEEALAGSGLHCPPVDSALLDRYLEYFFTSGYLTRPAAGPGPESEAERIPEDEPVSGTEPISGTEPISAAEPISGTEPISAAGPISGTEPIPAAEPISGTAAAARTERSR

SEQ ID NO: 118 - DNA, 3333 bp, Streptomyces rimosus
atgaccgacacgtacgtttcttcacgcccgttatccaagcggccccaggtcccgggtgcccgcacgccggcgcccggctacccacgggacagccgcatcccggagctgttcgaggcacaggccgcggcgctgccgcaggccccggcggcccggcacggggaccgcaccctgacctacggccaactcgacgcccacgccgacgcgttggcggaccggctggctgccggcggggtccggccgggtgacctgatcggcgtgtgcggcagccgttccctggaggcgctggtggcgctgctgggcatcctcaaggccggctgcgcgtacgtaccgctcgacgaggaactgccgccggcccggctgcgggccatggccgaggacgcgggcatcagcgccgcggtcaccctgccgggcagcacgcgccgggtgcggggtctacgcgtgtcagtcgaggtcggctccctcggccggcccgcccccgagcgcgcgagcggccccgcccccgaccgggccaccggctccgccgccgactgcgcctacgtcgccttcacttccggcacgaccggccggcccaagcccgtagcgctgtcccaccggggcgtggtccgcctcgtgctgtccgaccccggcctcacgccacccggaccgggcgacggagtgctgcacgcctacagcctgtcctccgacgcctcgaccatcgagatctggggcgcgctgctgaccggcgcctgcctggtcgtcgccgaccgcgaggaactgctctcgcccaccgccctggaacggctgctccgcgcgggcggcgtcaccgtggcgtacctgacgacgagcgtcttccacctcgtcgcccggacccgccccgaggcgctggccggcctgcggttcgtctccgcgggcggggaggcgatggacccgcgcctggcgaacgccgtcctcgcggcctgcccccgcaccacggtggtcaacttctacggcccgaccgagaacgccgtggtctccaccgcccatgtgctcacccccctccccgaggacgccgcacacgtccccctgggacgccccttcggcgcttccacctgccacgtcctgcgggccgacggctcgcccgcgcggccgggcgaggaaggggagctgtacgtcggcggggacgggctggcgctgggctacctcggcgacccgcagctgaccgccgagcggttcgtgacgctgcccgcggtcgagccggacggaccgctgtaccggaccggcgaccgggccgtacggcacgccgacgggctgctggagtaccgcggacggctcgaccgccaggtcaagctgcgcggcgcccgcatcgagctggacgaggtggagacccgcttacgggcccaccccgaggtcggcgaagcggccgtcgaggtcgacgggcactccctgaccgcctacgtcacggccaccgtccccggccgcccgctgccgctggccgacctgcgcgcgtactgcgccaagtggctgcccccgcaggccgtcccggccctgatacccctggaccgcttcccggtcaccagcggcggcaagatcgaccgcagccgtctgaagccgaccgcgccaccgcccggccccgaagacaccgcggaggccgcgcggcgcccggacgagccggaggccaccgacggcctgtccggtctcctctcggaagtgtggcaccaggtgctgcgtgtccggcccacgccccgggacgacttcttcctcctcggcggcgactccctgctcgcctcggagaccgtcacccgcaccctcgccgtactcggcctcgacgcggccctgggctccaccctcatcagggcgctgctggccgcgcccaccctcgaaagcttcaccgccgccgtacgcggagtccgcggcggcaccggcggaccggccggcggccaggaaccggccgtcgacttcgccgcggagaccggactcggcttcgccctcccgcccgccgaaggcccggcgccgaacccgcacgaccccgaggacgtcctgctcacgggcgcttccggcttcgtcggcggattcctgctgcaccgtctgctgcacgcgacggccgcccgcgtccactgccccgtacgggcgacgagccccgcccacgcccggcagcgggtccgcaccgccctcacccgctacgggctgcacctcgacgaggccgactggcagcgcgtggagtgcttccccggggacctgacccagccgcgcctggggctcgaccacgagcgcgccgacgcactggcccagcgcctggacctgatcgtgcacaacggtgcccgggtcaacttcctctacccctaccagcagttgcgcccggcgaacgtcgacggaacccgcgaggtcgtccggatcgccgcgcgccgccgggtgccggtgcacttcgtgtccaccgtcgcagtcgtcgcgggcttcggcaccgccggggtgcgcgaggtggacgaagatctgccgccggcccacgccgacgggctgaccatggggtacgcggagagcaagtgggtcgccgaaggggtgctgcggcaggcggccgcgcagggcctgccggtggccgtgtaccggccgtacgaggtcacgggcgaccggacgcacggcgcgtgcaacaccgagacggccatctgctcgctgttcaagatgatcgccgacacgggagtggcccccgacatcaagctgccgatggacttcgtacccgtcgaccacctcgccgagtccctggtgcacatcgccacgcaccggccggccgacggccgggtctaccacctgaccaacccgcgcccggcgatgctgtcggacgtcctcgaccggatgcgcgcggcgggcttcaccctgcgcaccctgccgtacgacgcgtgggtcggcgagctcgtccggcacgtcgccgagaacccgacgagcgccacggctccgttcgtgtccctgtgcgtggaccgcagccgcaccgccgacatgtccgtcaaggagatgtacctcaagggcaccttcccggtcctggggcggcgcaacgccgaggaggcgctggccggcagcgggctgcactgcccgccggtcgactccgctctgctggaccgctacctggagtacttcttcacctccggctacctcacgcgcccggcggccggccccgggcccgaatccgaggccgagcgaataccggaggacgagccggtgtccgggaccgaaccgatatccgggaccgaaccgatttctgccgccgagccgatatccgggaccgaaccgatttctgccgccgggccgatatccgggaccgagccgatacccgccgccgagccgatatccgggaccgcagccgcagcccgcacggagcgcagccgatga

SEQ ID NO: 119 - protein, 1168 aa, Mycobacterium tuberculosis
MSINDQRLTRRVEDLYASDAQFAAASPNEAITQAIDQPGVALPQLIRMVMEGYADRPALGQRALRFVTDPDSGRTMVELLPRFETITYRELWARAGTLATALSAEPAIRPGDRVCVLGFNSVDYTTIDIALIRLGAVSVPLQTSAPVTGLRPIVTETEPTMIATSIDNLGDAVEVLAGHAPARLVVFDYHGKVDTHREAVEAARARLAGSVTIDTLAELIERGRALPATPIADSADDALALLTYTSGSTGAPKGAMYRESQVMSFWRKSSGWFEPSGYPSITLNFMPMSHVGGRQVLYGTLSNGGTAYFVAKSDLSTLFEDLALVRPTELCFVPRIWDMVFAEFHSEVDRRLVDGADRAALEAQVKAELRENVLGGRFVMALTGSAPISAEMTAWVESLLADVHLVEGYGSTEAGMVLNDGMVRRPAVIDYKLVDVPELGYFGTDQPYPRGELLVKTQTMFPGYYQRPDVTAEVFDPDGFYRTGDIMAKVGPDQFVYLDRRNNVLKLSQGEFIAVSKLEAVFGDSPLVRQIFIYGNSARAYPLAVVVPSGDALSRHGIENLKPVISESLQEVARAAGLQSYEIPRDFIIETTPFTLENGLLTGIRKLARPQLKKFYGERLERLYTELADSQSNELRELRQSGPDAPVLPTLCRAAAALLGSTAADVRPDAHFADLGGDSLSALSLANLLHEIFGVDVPVGVIVSPASDLRALADHIEAARTGVRRPSFASIHGRSATEVHASDLTLDKFIDAATLAAAPNLPAPSAQVRTVLLTGATGFLGRYLALEWLDRMDLVNGKLICLVRARSDEEAQARLDATFDSGDPYLVRHYRELGAGRLEVLAGDKGEADLGLDRVTWQRLADTVDLIVDPAALVNHVLPYSQLFGPNAAGTAELLRLALTGKRKPYIYTSTIAVGEQIPPEAFTEDADIRAISPTRRIDDSYANGYANSKWAGEVLLREAHEQCGLPVTVFRCDMILADTSYTGQLNLPDMFTRLMLSLAATGIAPGSFYELDAHGNRQRAHYDGLPVEFVAEAICTLGTHSPDRFVTYHVMNPYDDGIGLDEFVDWLNSPTSGSGCTIQRIADYGEWLQRFETSLRALPDRQRHASLLPLLHNYREPAKPICGSIAPTDQFRAAVQEAKIGPDKDIPHLTAAIIAKYISNLRLLGLL

SEQ ID NO: 120 - DNA, 3507 bp, Mycobacterium tuberculosis
atgtcgatcaacgatcagcgactgacacgccgcgtcgaggacctatacgccagcgacgcccagttcgccgccgccagtcccaacgaggcgatcacccaggcgatcgaccagcccggggtcgcgcttccacagctcatccgtatggtcatggagggctacgccgatcggccggcactcggccagcgtgcgctccgcttcgtcaccgaccccgacagcggccgcaccatggtcgagctactgccgcggttcgagaccatcacctaccgcgaactgtgggcccgcgccggcacattggccaccgcgttgagcgctgagcccgcgatccggccgggcgaccgggtttgcgtgctgggcttcaacagcgtcgactacacaaccatcgacatcgcgctgatccggttgggcgccgtgtcggttccactgcagaccagtgcgccggtcaccgggttgcgcccgatcgtcaccgagaccgagccgacgatgatcgccaccagcatcgacaatcttggcgacgccgtcgaagtgctggccggtcacgccccggcccggctggtcgtattcgattaccacggcaaggttgacacccaccgcgaggccgtcgaagccgcccgagctcggttggccggctcggtgaccatcgacacacttgccgaactgatcgaacgcggcagggcgctgccggccacacccattgccgacagcgccgacgacgcgctggcgctgctgacttacacctcgggtagtaccggcgcacccaaaggcgccatgtatcgcgagagccaggtgatgagcttctggcgcaagtcgagtggctggttcgagccgagcggttacccctcgatcacgctgaacttcatgccgatgagccacgtcgggggccgtcaggtgctctacgggacgctttccaacggcggtaccgcctacttcgtcgccaagagcgacctgtcgacgctgttcgaggacctcgccctggtgcggcccacagaattgtgcttcgtgccgcgcatctgggacatggtgttcgcagagttccacagcgaggtcgaccgccgcttggtggacggcgccgatcgagcggcgctggaagcgcaggtgaaggccgagctgcgggagaacgtgctcggcggacggtttgtcatggcgctgaccggttccgcgccgatctccgctgagatgacggcgtgggtcgagtccctgctggccgacgtgcatttggtggagggttacggctccaccgaggccgggatggtcctgaacgacggcatggtgcggcgccccgcggtgatcgactacaagctggtcgacgtgcccgagctgggctacttcggcaccgatcagccctacccccggggcgagctgctggtcaagacgcaaaccatgttccccggctactaccagcgcccggatgtcaccgccgaggtgttcgaccccgacggcttctaccggaccggggacatcatggccaaagtaggccccgaccagttcgtctacctcgaccgccgcaacaacgtgctaaagctctcccagggcgagttcatcgccgtgtcgaagctcgaggcggtgttcggcgacagcccgctggtccgacagatcttcatctacggcaacagtgcccgggcctacccgctggcggtggttgtcccgtccggggacgcgctttctcgccatggcatcgagaatctcaagcccgtgatcagcgagtccctgcaggaggtagcgagggcggccggcctgcaatcctacgagattccacgcgacttcatcatcgaaaccacgccgttcaccctggagaacggcctgctcaccggcatccgcaagctggcacgcccgcagttgaagaagttctatggcgaacgtctcgagcggctctataccgagctggccgatagccaatccaacgagctgcgcgagctgcggcaaagcggtcccgatgcgccggtgcttccgacgctgtgccgtgccgcggctgcgttgctgggctctaccgctgcggatgtgcggccggacgcgcacttcgccgacctgggtggtgactcgctctcggcgctgtcgttggccaacctgctgcacgagatcttcggcgtcgacgtgccggtgggtgtcattgtcagcccggcaagcgacctgcgggccctggccgaccacatcgaagcagcgcgcaccggcgtcaggcgacccagcttcgcctcgatacacggtcgctccgcgacggaagtgcacgccagcgacctcacgctggacaagttcatcgacgctgccaccctggccgcagccccgaacctgccggcaccgagcgcccaagtgcgcaccgtactgctgaccggcgccaccggctttttgggtcgctacctggcgctggaatggctcgaccgcatggacctggtcaacggcaagctgatctgcctggtccgcgccagatccgacgaggaagcacaagcccggctggacgcgacgttcgatagcggcgacccgtatttggtgcggcactaccgcgaattgggcgccggccgcctcgaggtgctcgccggcgacaagggcgaggccgacctgggcctggaccgggtcacctggcagcggctagccgacacggtggacctgatcgtggaccccgcggccctggtcaaccacgtgctgccgtatagccagctgttcggcccaaacgcggcgggcaccgccgagttgcttcggctggcgctgaccggcaagcgcaagccatacatctacacctcgacgatcgccgtgggcgagcagatcccgccggaggcgttcaccgaggacgccgacatccgggccatcagcccgacccgcaggatcgacgacagctacgccaacggctacgcgaacagcaagtgggccggcgaggtgctgctgcgcgaagctcacgagcagtgcggcctgccggtgacggtcttccgctgcgacatgatcctggccgacaccagctataccggtcagctcaacctgccggacatgttcacccggctgatgctgagcctggccgctaccggcatcgcacccggttcgttctatgagctggatgcgcacggcaatcggcaacgcgcccactatgacggcttgccggtcgaattcgtcgcagaagccatttgcacccttgggacacatagcccggaccgttttgtcacctaccacgtgatgaacccctacgacgacggcatcgggctggacgagttcgtcgactggctcaactccccaactagcgggtccggttgcacgatccagcggatcgccgactacggcgagtggctgcagcggttcgagacttcgctgcgtgccttgccggatcgccagcgccacgcctcgctgctgcccttgctgcacaactaccgagagcctgcaaagccgatatgcgggtcaatcgcgcccaccgaccagttccgcgctgccgtccaagaagcgaaaatcggtccggacaaagacattccgcacctcacggcggcgatcatcgcgaagtacatcagcaacctgcgactgctcgggctgctgtga

SEQ ID NO: 121 - protein, 1093 aa, Mycobacterium tuberculosis
MVELLPRFETITYRELWARAGTLATALSAEPAIRPGDRVCVLGFNSVDYTTIDIALIRLGAVSVPLQTSAPVTGLRPIVTETEPTMIATSIDNLGDAVEVLAGHAPARLVVFDYHGKVDTHREAVEAARARLAGSVTIDTLAELIERGRALPATPIADSADDALALLIYTSGSTGAPKGAMYRESQVMSFWRKSSGWFEPSGYPSITLNFMPMSHVGGRQVLYGTLSNGGTAYFVAKSDLSTLFEDLALVRPTELCFVPRIWDMVFAEFHSEVDRRLVDGADRAALEAQVKAELRENVLGGRFVMALTGSAPISAEMTAWVESLLADVHLVEGYGSTEAGMVLNDGMVRRPAVIDYKLVDVPELGYFGTDQPYPRGELLVKTQTMFPGYYQRPDVTAEVFDPDGFYRTGDIMAKVGPDQFVYLDRRNNVLKLSQGEFIAVSKLEAVFGDSPLVRQIFIYGNSARAYPLAVVVPSGDALSRHGIENLKPVISESLQEVARAAGLQSYEIPRDFIIETTPFTLENGLLTGIRKLARPQLKKFYGERLERLYTELADSQSNELRELRQSGPDAPVLPTLCRAAAALLGSTAADVRPDAHFADLGGDSLSALSLANLLHEIFGVDVPVGVIVSPASDLRALADHIEAARTGVRRPSFASIHGRSATEVHASDLTLDKFIDAATLAAAPNLPAPSAQVRTVLLTGATGFLGRYLALEWLDRMDLVNGKLICLVRARSDEEAQARLDATFDSGDPYLVRHYRELGAGRLEVLAGDKGEADLGLDRVTWQRLADTVDLIVDPAALVNHVLPYSQLFGPNAAGTAELLRLALTGKRKPYIYTSTIAVGEQIPPEAFTEDADIRAISPTRRIDDSYANGYANSKWAGEVLLREAHEQCGLPVTVFRCDMILADTSYTGQLNLPDMFTRLMLSLAATGIAPGSFYELDAHGNRQRAHYDGLPVEFVAEAICTLGTHSPDRFVTYHVMNPYDDGIGLDEFVDWLNSPTSGSGCTIQRIADYGEWLQRFETSLRALPDRQRHASLLPLLHNYREPAKPICGSIAPTDQFRAAVQEAKIGPDKDIPHLTAAIIAKYISNLRLLGLL

SEQ ID NO: 122 - DNA, 3282 bp, Mycobacterium tuberculosis
atggtcgagctactgccgcggttcgagaccatcacctaccgcgaactgtgggcccgcgccggcacattggccaccgcgttgagcgctgagcccgcgatccggccgggcgaccgggtttgcgtgctgggcttcaacagcgtcgactacacaaccatcgacatcgcgctgatccggttgggcgccgtgtcggttccactgcagaccagtgcgccggtcaccgggttgcgcccgatcgtcaccgagaccgagccgacgatgatcgccaccagcatcgacaatcttggcgacgccgtcgaagtgctggccggtcacgccccggcccggctggtcgtattcgattaccacggcaaggttgacacccaccgcgaggccgtcgaagccgcccgagctcggttggccggctcggtgaccatcgacacacttgccgaactgatcgaacgcggcagggcgctgccggccacacccattgccgacagcgccgacgacgcgctggcgctgctgatttacacctcgggtagtaccggcgcacccaaaggcgccatgtatcgcgagagccaggtgatgagcttctggcgcaagtcgagtggctggttcgagccgagcggttacccctcgatcacgctgaacttcatgccgatgagccacgtcgggggccgtcaggtgctctacgggacgctttccaacggcggtaccgcctacttcgtcgccaagagcgacctgtcgacgctgttcgaggacctcgccctggtgcggcccacagaattgtgcttcgtgccgcgcatctgggacatggtgttcgcagagttccacagcgaggtcgaccgccgcttggtggacggcgccgatcgagcggcgctggaagcgcaggtgaaggccgagctgcgggagaacgtgctcggcggacggtttgtcatggcgctgaccggttccgcgccgatctccgctgagatgacggcgtgggtcgagtccctgctggccgacgtgcatttggtggagggttacggctccaccgaggccgggatggtcctgaacgacggcatggtgcggcgccccgcggtgatcgactacaagctggtcgacgtgcccgagctgggctacttcggcaccgatcagccctacccccggggcgagctgctggtcaagacgcaaaccatgttccccggctactaccagcgcccggatgtcaccgccgaggtgttcgaccccgacggcttctaccggaccggggacatcatggccaaagtaggccccgaccagttcgtctacctcgaccgccgcaacaacgtgctaaagctctcccagggcgagttcatcgccgtgtcgaagctcgaggcggtgttcggcgacagcccgctggtccgacagatcttcatctacggcaacagtgcccgggcctacccgctggcggtggttgtcccgtccggggacgcgctttctcgccatggcatcgagaatctcaagcccgtgatcagcgagtccctgcaggaggtagcgagggcggccggcctgcaatcctacgagattccacgcgacttcatcatcgaaaccacgccgttcaccctggagaacggcctgctcaccggcatccgcaagctggcacgcccgcagttgaagaagttctatggcgaacgtctcgagcggctctataccgagctggccgatagccaatccaacgagctgcgcgagctgcggcaaagcggtcccgatgcgccggtgcttccgacgctgtgccgtgccgcggctgcgttgctgggctctaccgctgcggatgtgcggccggacgcgcacttcgccgacctgggtggtgactcgctctcggcgctgtcgttggccaacctgctgcacgagatcttcggcgtcgacgtgccggtgggtgtcattgtcagcccggcaagcgacctgcgggccctggccgaccacatcgaagcagcgcgcaccggcgtcaggcgacccagcttcgcctcgatacacggtcgctccgcgacggaagtgcacgccagcgacctcacgctggacaagttcatcgacgctgccaccctggccgcagccccgaacctgccggcaccgagcgcccaagtgcgcaccgtactgctgaccggcgccaccggctttttgggtcgctacctggcgctggaatggctcgaccgcatggacctggtcaacggcaagctgatctgcctggtccgcgccagatccgacgaggaagcacaagcccggctggacgcgacgttcgatagcggcgacccgtatttggtgcggcactaccgcgaattgggcgccggccgcctcgaggtgctcgccggcgacaagggcgaggccgacctgggcctggaccgggtcacctggcagcggctagccgacacggtggacctgatcgtggaccccgcggccctggtcaaccacgtgctgccgtatagccagctgttcggcccaaacgcggcgggcaccgccgagttgcttcggctggcgctgaccggcaagcgcaagccatacatctacacctcgacgatcgccgtgggcgagcagatcccgccggaggcgttcaccgaggacgccgacatccgggccatcagcccgacccgcaggatcgacgacagctacgccaacggctacgcgaacagcaagtgggccggcgaggtgctgctgcgcgaagctcacgagcagtgcggcctgccggtgacggtcttccgctgcgacatgatcctggccgacaccagctataccggtcagctcaacctgccggacatgttcacccggctgatgctgagcctggccgctaccggcatcgcacccggttcgttctatgagctggatgcgcacggcaatcggcaacgcgcccactatgacggcttgccggtcgaattcgtcgcagaagccatttgcacccttgggacacatagcccggaccgttttgtcacctaccacgtgatgaacccctacgacgacggcatcgggctggacgagttcgtcgactggctcaactccccaactagcgggtccggttgcacgatccagcggatcgccgactacggcgagtggctgcagcggttcgagacttcgctgcgtgccttgccggatcgccagcgccacgcctcgctgctgcccttgctgcacaactaccgagagcctgcaaagccgatatgcgggtcaatcgcgcccaccgaccagttccgcgctgccgtccaagaagcgaaaatcggtccggacaaagacattccgcacctcacggcggcgatcatcgcgaagtacatcagcaacctgcgactgctcgggctgctgtga

SEQ ID NO: 123 - protein, 1041 aa, Mycobacterium tuberculosis
DIALIRLGAVSVPLQTSAPVTGLRPIVTETEPTMIATSIDNLGDAVEVLAGHAPARLVVFDYHGKVDTHREAVEAARARLAGSVTIDTLAELIERGRALPATPIADSADDALALLIYTSGSTGAPKGAMYRESQVMSFWRKSSGWFEPSGYPSITLNFMPMSHVGGRQVLYGTLSNGGTAYFVAKSDLSTLFEDLALVRPTELCFVPRIWDMVFAEFHSEVDRRLVDGADRAALEAQVKAELRENVLGGRFVMALTGSAPISAEMTAWVESLLADVHLVEGYGSTEAGMVLNDGMVRRPAVIDYKLVDVPELGYFGTDQPYPRGELLVKTQTMFPGYYQRPDVTAEVFDPDGFYRTGDIMAKVGPDQFVYLDRRNNVLKLSQGEFIAVSKLEAVFGDSPLVRQIFIYGNSARAYPLAVVVPSGDALSRHGIENLKPVISESLQEVARAAGLQSYEIPRDFIIETTPFTLENGLLTGIRKLARPQLKKFYGERLERLYTELADSQSNELRELRQSGPDAPVLPTLCRAAAALLGSTAADVRPDAHFADLGGDSLSALSLANLLHEIFGVDVPVGVIVSPASDLRALADHIEAARTGVRRPSFASIHGRSATEVHASDLTLDKFIDAATLAAAPNLPAPSAQVRTVLLTGATGFLGRYLALEWLDRMDLVNGKLICLVRARSDEEAQARLDATFDSGDPYLVRHYRELGAGRLEVLAGDKGEADLGLDRVTWQRLADTVDLIVDPAALVNHVLPYSQLFGPNAAGTAELLRLALTGKRKPYIYTSTIAVGEQIPPEAFTEDADIRAISPTRRIDDSYANGYANSKWAGEVLLREAHEQCGLPVTVFRCDMILADTSYTGQLNLPDMFTRLMLSLAATGIAPGSFYELDAHGNRQRAHYDGLPVEFVAEAICTLGTHSPDRFVTYHVMNPYDDGIGLDEFVDWLNSPTSGSGCTIQRIADYGEWLQRFETSLRALPDRQRHASLLPLLHNYREPAKPICGSIAPTDQFRAAVQEAKIGPDKDIPHLTAAIIAKYISNLRLLGLL

SEQ ID NO: 124 - DNA, 3126 bp, Mycobacterium tuberculosis
gacatcgcgctgatccggttgggcgccgtgtcggttccactgcagaccagtgcgccggtcaccgggttgcgcccgatcgtcaccgagaccgagccgacgatgatcgccaccagcatcgacaatcttggcgacgccgtcgaagtgctggccggtcacgccccggcccggctggtcgtattcgattaccacggcaaggttgacacccaccgcgaggccgtcgaagccgcccgagctcggttggccggctcggtgaccatcgacacacttgccgaactgatcgaacgcggcagggcgctgccggccacacccattgccgacagcgccgacgacgcgctggcgctgctgatttacacctcgggtagtaccggcgcacccaaaggcgccatgtatcgcgagagccaggtgatgagcttctggcgcaagtcgagtggctggttcgagccgagcggttacccctcgatcacgctgaacttcatgccgatgagccacgtcgggggccgtcaggtgctctacgggacgctttccaacggcggtaccgcctacttcgtcgccaagagcgacctgtcgacgctgttcgaggacctcgccctggtgcggcccacagaattgtgcttcgtgccgcgcatctgggacatggtgttcgcagagttccacagcgaggtcgaccgccgcttggtggacggcgccgatcgagcggcgctggaagcgcaggtgaaggccgagctgcgggagaacgtgctcggcggacggtttgtcatggcgctgaccggttccgcgccgatctccgctgagatgacggcgtgggtcgagtccctgctggccgacgtgcatttggtggagggttacggctccaccgaggccgggatggtcctgaacgacggcatggtgcggcgccccgcggtgatcgactacaagctggtcgacgtgcccgagctgggctacttcggcaccgatcagccctacccccggggcgagctgctggtcaagacgcaaaccatgttccccggctactaccagcgcccggatgtcaccgccgaggtgttcgaccccgacggcttctaccggaccggggacatcatggccaaagtaggccccgaccagttcgtctacctcgaccgccgcaacaacgtgctaaagctctcccagggcgagttcatcgccgtgtcgaagctcgaggcggtgttcggcgacagcccgctggtccgacagatcttcatctacggcaacagtgcccgggcctacccgctggcggtggttgtcccgtccggggacgcgctttctcgccatggcatcgagaatctcaagcccgtgatcagcgagtccctgcaggaggtagcgagggcggccggcctgcaatcctacgagattccacgcgacttcatcatcgaaaccacgccgttcaccctggagaacggcctgctcaccggcatccgcaagctggcacgcccgcagttgaagaagttctatggcgaacgtctcgagcggctctataccgagctggccgatagccaatccaacgagctgcgcgagctgcggcaaagcggtcccgatgcgccggtgcttccgacgctgtgccgtgccgcggctgcgttgctgggctctaccgctgcggatgtgcggccggacgcgcacttcgccgacctgggtggtgactcgctctcggcgctgtcgttggccaacctgctgcacgagatcttcggcgtcgacgtgccggtgggtgtcattgtcagcccggcaagcgacctgcgggccctggccgaccacatcgaagcagcgcgcaccggcgtcaggcgacccagcttcgcctcgatacacggtcgctccgcgacggaagtgcacgccagcgacctcacgctggacaagttcatcgacgctgccaccctggccgcagccccgaacctgccggcaccgagcgcccaagtgcgcaccgtactgctgaccggcgccaccggctttttgggtcgctacctggcgctggaatggctcgaccgcatggacctggtcaacggcaagctgatctgcctggtccgcgccagatccgacgaggaagcacaagcccggctggacgcgacgttcgatagcggcgacccgtatttggtgcggcactaccgcgaattgggcgccggccgcctcgaggtgctcgccggcgacaagggcgaggccgacctgggcctggaccgggtcacctggcagcggctagccgacacggtggacctgatcgtggaccccgcggccctggtcaaccacgtgctgccgtatagccagctgttcggcccaaacgcggcgggcaccgccgagttgcttcggctggcgctgaccggcaagcgcaagccatacatctacacctcgacgatcgccgtgggcgagcagatcccgccggaggcgttcaccgaggacgccgacatccgggccatcagcccgacccgcaggatcgacgacagctacgccaacggctacgcgaacagcaagtgggccggcgaggtgctgctgcgcgaagctcacgagcagtgcggcctgccggtgacggtcttccgctgcgacatgatcctggccgacaccagctataccggtcagctcaacctgccggacatgttcacccggctgatgctgagcctggccgctaccggcatcgcacccggttcgttctatgagctggatgcgcacggcaatcggcaacgcgcccactatgacggcttgccggtcgaattcgtcgcagaagccatttgcacccttgggacacatagcccggaccgttttgtcacctaccacgtgatgaacccctacgacgacggcatcgggctggacgagttcgtcgactggctcaactccccaactagcgggtccggttgcacgatccagcggatcgccgactacggcgagtggctgcagcggttcgagacttcgctgcgtgccttgccggatcgccagcgccacgcctcgctgctgcccttgctgcacaactaccgagagcctgcaaagccgatatgcgggtcaatcgcgcccaccgaccagttccgcgctgccgtccaagaagcgaaaatcggtccggacaaagacattccgcacctcacggcggcgatcatcgcgaagtacatcagcaacctgcgactgctcgggctgctgtga

SEQ ID NO: 125 - protein, 1000 aa, Mycobacterium tuberculosis
MSINDQRLTRRVEDLYASDAQFAAASPNEAITQAIDQPGVALPQLIRMVMEGYADRPALGQRALRFVTDPDSGRTMVELLPRFETITYRELWARAGTLATALSAEPAIRPGDRVCVLGFNSVDYTTIDIALIRLGAVSVPLQTSAPVTGLRPIVTETEPTMIATSIDNLGDAVEVLAGHAPARLVVFDYHGKVDTHREAVEAARARLAGSVTIDTLAELIERGRALPATPIADSADDALALLIYTSGSTGAPKGAMYRESQVMSFWRKSSGWFEPSGYPSITLNFMPMSHVGGRQVLYGTLSNGGTAYFVAKSDLSTLFEDLALVRPTELCFVPRIWDMVFAEFHSEVDRRLVDGADRAALEAQVKAELRENVLGGRFVMALTGSAPISAEMTAWVESLLADVHLVEGYGSTEAGMVLNDGMVRRPAVIDYKLVDVPELGYFGTDQPYPRGELLVKTQTMFPGYYQRPDVTAEVFDPDGFYRTGDIMAKVGPDQFVYLDRRNNVLKLSQGEFIAVSKLEAVFGDSPLVRQIFIYGNSARAYPLAVVVPSGDALSRHGIENLKPVISESLQEVARAAGLQSYEIPRDFIIETTPFTLENGLLTGIRKLARPQLKKFYGERLERLYTELADSQSNELRELRQSGPDAPVLPTLCRAAAALLGSTAADVRPDAHFADLGGDSLSALSLANLLHEIFGVDVPVGVIVSPASDLRALADHIEAARTGVRRPSFASIHGRSATEVHASDLTLDKFIDAATLAAAPNLPAPSAQVRTVLLTGATGFLGRYLALEWLDRMDLVNGKLICLVRARSDEEAQARLDATFDSGDPYLVRHYRELGAGRLEVLAGDKGEADLGLDRVTWQRLADTVDLIVDPAALVNHVLPYSQLFGPNAAGTAELLRLALTGKRKPYIYTSTIAVGEQIPPEAFTEDADIRAISPTRRIDDSYANGYANSKWAGEVLLREAHEQCGLPVTVFRCDMILGRHQLYRSAQPAGHVTRADAEPG

SEQ ID NO: 126 - DNA, 3000 bp, Mycobacterium tuberculosis
atgtcgatcaacgatcagcgactgacacgccgcgtcgaggacctatacgccagcgacgcccagttcgccgccgccagtcccaacgaggcgatcacccaggcgatcgaccagcccggggtcgcgcttccacagctcatccgtatggtcatggagggctacgccgatcggccggcactcggccagcgtgcgctccgcttcgtcaccgaccccgacagcggccgcaccatggtcgagctactgccgcggttcgagaccatcacctaccgcgaactgtgggcccgcgccggcacattggccaccgcgttgagcgctgagcccgcgatccggccgggcgaccgggtttgcgtgctgggcttcaacagcgtcgactacacaaccatcgacatcgcgctgatccggttgggcgccgtgtcggttccactgcagaccagtgcgccggtcaccgggttgcgcccgatcgtcaccgagaccgagccgacgatgatcgccaccagcatcgacaatcttggcgacgccgtcgaagtgctggccggtcacgccccggcccggctggtcgtattcgattaccacggcaaggttgacacccaccgcgaggccgtcgaagccgcccgagctcggttggccggctcggtgaccatcgacacacttgccgaactgatcgaacgcggcagggcgctgccggccacacccattgccgacagcgccgacgacgcgctggcgctgctgatttacacctcgggtagtaccggcgcacccaaaggcgccatgtatcgcgagagccaggtgatgagcttctggcgcaagtcgagtggctggttcgagccgagcggttacccctcgatcacgctgaacttcatgccgatgagccacgtcgggggccgtcaggtgctctacgggacgctttccaacggcggtaccgcctacttcgtcgccaagagcgacctgtcgacgctgttcgaggacctcgccctggtgcggcccacagaattgtgcttcgtgccgcgcatctgggacatggtgttcgcagagttccacagcgaggtcgaccgccgcttggtggacggcgccgatcgagcggcgctggaagcgcaggtgaaggccgagctgcgggagaacgtgctcggcggacggtttgtcatggcgctgaccggttccgcgccgatctccgctgagatgacggcgtgggtcgagtccctgctggccgacgtgcatttggtggagggttacggctccaccgaggccgggatggtcctgaacgacggcatggtgcggcgccccgcggtgatcgactacaagctggtcgacgtgcccgagctgggctacttcggcaccgatcagccctacccccggggcgagctgctggtcaagacgcaaaccatgttccccggctactaccagcgcccggatgtcaccgccgaggtgttcgaccccgacggcttctaccggaccggggacatcatggccaaagtaggccccgaccagttcgtctacctcgaccgccgcaacaacgtgctaaagctctcccagggcgagttcatcgccgtgtcgaagctcgaggcggtgttcggcgacagcccgctggtccgacagatcttcatctacggcaacagtgcccgggcctacccgctggcggtggttgtcccgtccggggacgcgctttctcgccatggcatcgagaatctcaagcccgtgatcagcgagtccctgcaggaggtagcgagggcggccggcctgcaatcctacgagattccacgcgacttcatcatcgaaaccacgccgttcaccctggagaacggcctgctcaccggcatccgcaagctggcacgcccgcagttgaagaagttctatggcgaacgtctcgagcggctctataccgagctggccgatagccaatccaacgagctgcgcgagctgcggcaaagcggtcccgatgcgccggtgcttccgacgctgtgccgtgccgcggctgcgttgctgggctctaccgctgcggatgtgcggccggacgcgcacttcgccgacctgggtggtgactcgctctcggcgctgtcgttggccaacctgctgcacgagatcttcggcgtcgacgtgccggtgggtgtcattgtcagcccggcaagcgacctgcgggccctggccgaccacatcgaagcagcgcgcaccggcgtcaggcgacccagcttcgcctcgatacacggtcgctccgcgacggaagtgcacgccagcgacctcacgctggacaagttcatcgacgctgccaccctggccgcagccccgaacctgccggcaccgagcgcccaagtgcgcaccgtactgctgaccggcgccaccggctttttgggtcgctacctggcgctggaatggctcgaccgcatggacctggtcaacggcaagctgatctgcctggtccgcgccagatccgacgaggaagcacaagcccggctggacgcgacgttcgatagcggcgacccgtatttggtgcggcactaccgcgaattgggcgccggccgcctcgaggtgctcgccggcgacaagggcgaggccgacctgggcctggaccgggtcacctggcagcggctagccgacacggtggacctgatcgtggaccccgcggccctggtcaaccacgtgctgccgtatagccagctgttcggcccaaacgcggcgggcaccgccgagttgcttcggctggcgctgaccggcaagcgcaagccatacatctacacctcgacgatcgccgtgggcgagcagatcccgccggaggcgttcaccgaggacgccgacatccgggccatcagcccgacccgcaggatcgacgacagctacgccaacggctacgcgaacagcaagtgggccggcgaggtgctgctgcgcgaagctcacgagcagtgcggcctgccggtgacggtcttccgctgcgacatgatcctgggccgacaccagctataccggtcagctcaacctgccggacatgtcacccgggctgatgctgagcctggc

SEQ ID NO: 127 - protein, 1174 aa, Mycobacterium intracellulare; identical to SEQ ID NO: 59

SEQ ID NO: 128 - DNA, 3525 bp, Mycobacterium intracellulare; identical to SEQ ID NO: 60

SEQ ID NO: 129 - protein, 7 aa, Artificial sequence
  Synthetic polypeptide
  VARIANT (3)..(4): Xaa is any amino acid
  VARIANT (5)..(5): Xaa is Ser, Ala, or Thr
  VARIANT (7)..(7): Xaa is Trp or Leu
GYXXXKX

SEQ ID NO: 130 - protein, 7 aa, Artificial sequence
  Synthetic polypeptide
  VARIANT (2)..(3): Xaa is any amino acid
  VARIANT (5)..(5): Xaa is any amino acid
GXXGXLG

SEQ ID NO: 131 - protein, 8 aa, Artificial sequence
  Synthetic polypeptide
  VARIANT (1)..(1): Xaa is Leu, Val, or Ile
  VARIANT (6)..(7): Xaa is any amino acid
XGGDSXXA

SEQ ID NO: 132 - protein, 12 aa, Artificial sequence
  Synthetic polypeptide
  VARIANT (1)..(1): Xaa is Leu, Ile, Val, Met, Phe, or Tyr
  VARIANT (2)..(2): Xaa is any amino acid except Glu
  VARIANT (3)..(3): Xaa is any amino acid except Val, Glu, or Ser
  VARIANT (4)..(4): Xaa is Ser, Thr, or Gly
  VARIANT (5)..(5): Xaa is Ser, Thr, Ala, or Gly
  VARIANT (7)..(7): Xaa is Ser or Thr
  VARIANT (8)..(8): Xaa is Ser, Thr, Glu, Ile, or Ala
  VARIANT (9)..(9): Xaa is Ser or Gly
  VARIANT (10)..(10): Xaa is any amino acid
  VARIANT (11)..(11): Xaa is Pro, Ala, Ser, Leu, Ile, Val, or Met
  VARIANT (12)..(12): Xaa is Lys or Arg
XXXXXGXXXXXX

SEQ ID NO: 133 - protein, 21 aa, Artificial sequence
  Synthetic polypeptide
  VARIANT (6)..(6): Xaa is Ser or Thr
  VARIANT (9)..(9): Xaa is Thr or Asn
  VARIANT (11)..(11): Xaa is Phe or Trp
  VARIANT (15)..(15): Xaa is Phe or Tyr
  VARIANT (17)..(17): Xaa is Ala or Thr
  VARIANT (19)..(19): Xaa is Glu or Gln
RTVLLXGAXGXLGRXLXLXWL

SEQ ID NO: 134 - protein, 20 aa, Artificial sequence
  Synthetic polypeptide
  VARIANT (2)..(3): Xaa is any amino acid
  VARIANT (5)..(6): Xaa is any amino acid
  VARIANT (8)..(8): Xaa is any amino acid
  VARIANT (11)..(12): Xaa is any amino acid
  VARIANT (14)..(14): Xaa is any amino acid
  VARIANT (16)..(16): Xaa is any amino acid
  VARIANT (19)..(19): Xaa is any amino acid
LXXGXXGXLGXXLXLXWLXR

SEQ ID NO: 135 - protein, 8 aa, Artificial sequence
  Synthetic polypeptide
  VARIANT (3)..(3): Xaa is any amino acid
WAXEVLLR

SEQ ID NO: 136 - protein, 33 aa, Artificial sequence
  Synthetic polypeptide
  VARIANT (2)..(3): Xaa is any amino acid
  VARIANT (5)..(6): Xaa is any amino acid
  VARIANT (8)..(8): Xaa is any amino acid
  VARIANT (11)..(12): Xaa is any amino acid
  VARIANT (14)..(14): Xaa is any amino acid
  VARIANT (15)..(15): Xaa is Leu or Ile
  VARIANT (16)..(16): Xaa is any amino acid
  VARIANT (17)..(17): Xaa is Trp or Leu
  VARIANT (19)..(31): Xaa is any amino acid
  VARIANT (32)..(32): Xaa is any amino acid and can be present or absent
LXXGXXGXLGXXLXXXXLXXXXXXXXXXXXXXR

SEQ ID NO: 137 - protein, 341 aa, Synechococcus elongatus
MFGLIGHLTSLEQARDVSRRMGYDEYADQGLEFWSSAPPQIVDEITVTSATGKVIHGRYIESCFLPEMLAARRFKTATRKVLNAMSHAQKHGIDISALGGFTSIIFENFDLASLRQVRDTTLEFERFTTGNTHTAYVICRQVEAAAKTLGIDITQATVAVVGATGDIGSAVCRWLDLKLGVGDLILTARNQERLDNLQAELGRGKILPLEAALPEADFIVWVASMPQGVVIDPATLKQPCVLIDGGYPKNLGSKVQGEGIYVLNGGVVEHCFDIDWQIMSAAEMARPERQMFACFAEAMLLEFEGWHTNFSWGRNQITIEKMEAIGEASVRHGFQPLALAI

SEQ ID NO: 138 - DNA, 1026 bp, Synechococcus elongatus
atgttcggtcttatcggtcatctcaccagtttggagcaggcccgcgacgtttctcgcaggatgggctacgacgaatacgccgatcaaggattggagttttggagtagcgctcctcctcaaatcgttgatgaaatcacagtcaccagtgccacaggcaaggtgattcacggtcgctacatcgaatcgtgtttcttgccggaaatgctggcggcgcgccgcttcaaaacagccacgcgcaaagttctcaatgccatgtcccatgcccaaaaacacggcatcgacatctcggccttggggggctttacctcgattattttcgagaatttcgatttggccagtttgcggcaagtgcgcgacactaccttggagtttgaacggttcaccaccggcaatactcacacggcctacgtaatctgtagacaggtggaagccgctgctaaaacgctgggcatcgacattacccaagcgacagtagcggttgtcggcgcgactggcgatatcggtagcgctgtctgccgctggctcgacctcaaactgggtgtcggtgatttgatcctgacggcgcgcaatcaggagcgtttggataacctgcaggctgaactcggccggggcaagattctgcccttggaagccgctctgccggaagctgactttatcgtgtgggtcgccagtatgcctcagggcgtagtgatcgacccagcaaccctgaagcaaccctgcgtcctaatcgacgggggctaccccaaaaacttgggcagcaaagtccaaggtgagggcatctatgtcctcaatggcggggtagttgaacattgcttcgacatcgactggcagatcatgtccgctgcagagatggcgcggcccgagcgccagatgtttgcctgctttgccgaggcgatgctcttggaatttgaaggctggcatactaacttctcctggggccgcaaccaaatcacgatcgagaagatggaagcgatcggtgaggcatcggtgcgccacggcttccaacccttggcattggcaatttga

SEQ ID NO: 139 - protein, 340 aa, Synechocystis sp. PCC6803
MFGLIGHLTSLEHAQAVAEDLGYPEYANQGLDFWCSAPPQVVDNFQVKSVTGQVIEGKYVESCFLPEMLTQRRIKAAIRKILNAMALAQKVGLDITALGGFSSIVFEEFNLKQNNQVRNVELDFQRFTTGNTHTAYVICRQVESGAKQLGIDLSQATVAVCGATGDIGSAVCRWLDSKHQVKELLLIARNRQRLENLQEELGRGKIMDLETALPQADIIVWVASMPKGVEIAGEMLKKPCLIVDGGYPKNLDTRVKADGVHILKGGIVEHSLDITWEIMKIVEMDIPSRQMFACFAEAILLEFEGWRTNFSWGRNQISVNKMEAIGEASVKHGFCPLVAL

SEQ ID NO: 140 - DNA, 1023 bp, Synechocystis sp. PCC6803
atgtttggtcttattggtcatctcacgagtttagaacacgcccaagcggttgctgaagatttaggctatcctgagtacgccaaccaaggcctggatttttggtgttcggctcctccccaagtggttgataattttcaggtgaaaagtgtgacggggcaggtgattgaaggcaaatatgtggagtcttgctttttgccggaaatgttaacccaacggcggatcaaagcggccattcgtaaaatcctcaatgctatggccctggcccaaaaggtgggcttggatattacggccctgggaggcttttcttcaatcgtatttgaagaatttaacctcaagcaaaataatcaagtccgcaatgtggaactagattttcagcggttcaccactggtaatacccacaccgcttatgtgatctgccgtcaggtcgagtctggagctaaacagttgggtattgatctaagtcaggcaacggtagcggtttgtggcgccacgggagatattggtagcgccgtatgtcgttggttagatagcaaacatcaagttaaggaattattgctaattgcccgtaaccgccaaagattggaaaatctccaagaggaattgggtcggggcaaaattatggatttggaaacagccctgccccaggcagatattattgtttgggtggctagtatgcccaagggggtagaaattgcgggggaaatgctgaaaaagccctgtttgattgtggatgggggctatcccaagaatttagacaccagggtgaaagcggatggggtgcatattctcaagggggggattgtagaacattcccttgatattacctgggaaattatgaagattgtggagatggatattccctcccggcaaatgttcgcctgttttgcggaggccattttgctagagtttgagggctggcgcactaatttttcctggggccgcaaccaaatttccgttaataaaatggaggcgattggtgaagcttctgtcaagcatggcttttgccctttagtagctctttag

SEQ ID NO: 141 - protein, 340 aa, Cyanothece sp. ATCC51142
MFGLIGHLTSLEHAHSVADAFGYGPYATQGLDLWCSAPPQFVEHFHVTSITGQTIEGKYIESAFLPEMLIKRRIKAAIRKILNAMAFAQKNNLNITALGGFSSIIFEEFNLKENRQVRNVSLEFDRFTTGNTHTAYIICRQVEQASAKLGIDLSQATVAICGATGDIGSAVCRWLDRKTDTQELFLIARNKERLQRLQDELGRGKIMGLEEALPEADIIVWVASMPKGVEINAETLKKPCLIIDGGYPKNLDTKIKHPDVHILKGGIVEHSLDIDWKIMETVNMDVPSRQMFACFAEAILLEFEQWHTNFSWGRNQITVTKMEQIGEASVKHGLQPLLSW

SEQ ID NO: 142 - DNA, 1023 bp, Cyanothece sp. ATCC51142
atgtttggtttaattggtcatcttacaagtttagaacacgcccactccgttgctgatgcctttggctatggcccatacgccactcagggacttgatttgtggtgttctgctccaccccaattcgtcgagcattttcatgttactagcatcacaggacaaaccatcgaaggaaagtatatagaatccgctttcttaccagaaatgctgataaagcgacggattaaagcagcaattcgcaaaatactgaatgcgatggcctttgctcagaaaaataaccttaacatcacagcattagggggcttttcttcgattatttttgaagaatttaatctcaaagagaatagacaagttcgtaatgtctctttagagtttgatcgcttcaccaccggaaacacccatactgcttatatcatttgtcgtcaagttgaacaggcatccgctaaactagggattgacttatcccaagcaacggttgctatttgcggggcaaccggagatattggcagtgcagtgtgtcgttggttagatagaaaaaccgatacccaggaactattcttaattgctcgcaataaagaacgattacaacgactgcaagatgagttgggacggggtaaaattatgggattggaggaggctttacccgaagcagatattatcgtttgggtggcgagtatgcccaaaggagtggaaattaatgccgaaactctcaaaaaaccctgtttaattatcgatggtggttatcctaagaatttagacacaaaaattaaacatcctgatgtccatatcctgaaagggggaattgtagaacattctctagatattgactggaagattatggaaactgtcaatatggatgttccttctcgtcaaatgtttgcttgttttgccgaagccattttattagagtttgaacaatggcacactaatttttcttggggacgcaatcaaattacagtgactaaaatggaacaaataggagaagcttctgtcaaacatgggttacaaccgttgttgagttggtaa

SEQ ID NO: 143 - protein, 346 aa, Prochlorococcus marinus
MFGLIGHSTSFEDAKRKASLLGFDHIADGDLDVWCTAPPQLVENVEVKSAIGISIEGSYIDSCFVPEMLSRFKTARRKVLNAMELAQKKGINITALGGFTSIIFENFNLLQHKQIRNTSLEWERFTTGNTHTAWVICRQLEMNAPKIGIDLKSATVAVVGATGDIGSAVCRWLINKTGIGELLLVARQKEPLDSLQKELDGGTIKNLDEALPEADIVVWVASMPKTMEIDANNLKQPCLMIDGGYPKNLDEKFQGNNIHVVKGGIVRFFNDIGWNMMELAEMQNPQREMFACFAEAMILEFEKCHTNFSWGRNNISLEKMEFIGAASVKHGFSAIGLDKHPKVLAV

SEQ ID NO: 144 - DNA, 1041 bp, Prochlorococcus marinus
atgtttgggcttataggtcattcaactagttttgaagatgcaaaaagaaaggcttcattattgggctttgatcatattgcggatggtgatttagatgtttggtgcacagctccacctcaactagttgaaaatgtagaggttaaaagtgctataggtatatcaattgaaggttcttatattgattcatgtttcgttcctgaaatgctttcaagatttaaaacggcaagaagaaaagtattaaatgcaatggaattagctcaaaaaaaaggtattaatattaccgctttgggggggttcacttctatcatctttgaaaattttaatctccttcaacataagcagattagaaacacttcactagagtgggaaaggtttacaactggtaatactcatactgcgtgggttatttgcaggcaattagagatgaatgctcctaaaataggtattgatcttaaaagcgcaacagttgctgtagttggtgctactggagatataggcagtgctgtttgtcgatggttaatcaataaaacaggtattggggaacttcttttggtagctaggcaaaaggaacccttggattctttgcaaaaggaattagatggtggaactatcaaaaatctagatgaagcattgcctgaagcagatattgttgtatgggtagcaagtatgccaaagacaatggaaatcgatgctaataatcttaaacaaccatgtttaatgattgatggaggttatccaaagaatctagatgaaaaatttcaaggaaataatatacatgttgtaaaaggaggtatagtaagattcttcaatgatataggttggaatatgatggaactagctgaaatgcaaaatccccagagagaaatgtttgcatgctttgcagaagcaatgattttagaatttgaaaaatgtcatacaaactttagctggggaagaaataatatatctctcgagaaaatggagtttattggagctgcttctgtaaagcatggcttctctgcaattggcctagataagcatccaaaagtactagcagtttga

SEQ ID NO: 145 - protein, 350 aa, Gloeobacter violaceus
MFGLIGHLTNLSHAQRVARDLGYDEYASHDLEFWCMAPPQAVDEITITSVTGQVIHGQYVESCFLPEMLAQGRFKTAMRKILNAMALVQKRGIDITALGGFSSIIFENFSLDKLLNVRDITLDIQRFTTGNTHTAYILCQQVEQGAVRYGIDPAKATVAVVGATGDIGSAVCRWLTDRAGIHELLLVARDAERLDRLQQELGTGRILPVEEALPKADIVVWVASMNQGMAIDPAGLRTPCLLIDGGYPKNMAGTLQRPGIHILDGGMVEHSLDIDWQIMSFLNVPNPARQFFACFAESMLLEFEGLHFNFSWGRNHITVEKMAQIGSLSKKHGFRPLLEPSQRSGELVHG

SEQ ID NO: 146 - DNA, 1053 bp, Gloeobacter violaceus
atgtttggcctgatcggacacttgaccaatctttcccatgcccagcgggtcgcccgcgacctgggctacgacgagtatgcaagccacgacctcgaattctggtgcatggcccctccccaggcggtcgatgaaatcacgatcaccagcgtcaccggtcaggtgatccacggtcagtacgtcgaatcgtgctttctgccggagatgctcgcccagggccgcttcaagaccgccatgcgcaagatcctcaatgccatggccctggtccagaagcgcggcatcgacattacggccctgggaggcttctcgtcgatcatcttcgagaatttcagcctcgataaattgctcaacgtccgcgacatcaccctcgacatccagcgcttcaccaccggcaacacccacacggcctacatcctttgtcagcaggtcgagcagggtgcggtacgctacggcatcgatccggccaaagcgaccgtggcggtagtcggggccaccggcgacatcggtagcgccgtctgccgatggctcaccgaccgcgccggcatccacgaactcttgctggtggcccgcgacgccgaaaggctcgaccggctgcagcaggaactcggcaccggtcggatcctgccggtcgaagaagcacttcccaaagccgacatcgtcgtctgggtcgcctcgatgaaccagggcatggccatcgaccccgccggcctgcgcaccccctgcctgctcatcgacggcggctaccccaagaacatggccggcaccctgcagcgcccgggcatccatatcctcgacggcggcatggtcgagcactcgctcgacatcgactggcagatcatgtcgtttctaaatgtgcccaaccccgcccgccagttcttcgcctgcttcgccgagtcgatgctgctggaattcgaagggcttcacttcaatttttcctggggccgcaaccacatcaccgtcgagaagatggcccagatcggctcgctgtctaaaaaacatggctttcgtcccctgcttgaacccagtcagcgcagcggcgaactcgtacacggataa

SEQ ID NO: 147 - protein, 339 aa, Nostoc punctiforme
MFGLIGHLTSLEHAQAVAQELGYPEYADQGLDFWCSAPPQIVDSIIVTSVTGQQIEGRYVESCFLPEMLASRRIKAATRKILNAMAHAQKHGINITALGGFSSIIFENFKLEQFSQVRNIKLEFERFTTGNTHTAYIICKQVEEASKQLGINLSNATVAVCGATGDIGSAVTRWLDARTDVQELLLIARDQERLKELQGELGRGKIMGLTEALPQADVVVWVASMPRGVEIDPTTLKQPCLLIDGGYPKNLATKIQYPGVHVLNGGIVEHSLDIDWKIMKIVNMDVPARQLFACFAESMLLEFEKLYTNFSWGRNQITVDKMEQIGRVSVKHGFRPLLV

SEQ ID NO: 148 - DNA, 1020 bp, Nostoc punctiforme
atgtttggtctaattggacatctgactagtttagaacacgctcaagccgtagcccaagaattgggatacccagaatatgccgatcaagggctagacttttggtgcagcgccccgccgcaaattgtcgatagtattattgtcaccagtgttactgggcaacaaattgaaggacgatatgtagaatcttgctttttgccggaaatgctagctagtcgccgcatcaaagccgcaacacggaaaatcctcaacgctatggcccatgcacagaagcacggcattaacatcacagctttaggcggattttcctcgattatttttgaaaactttaagttagagcagtttagccaagtccgaaatatcaagctagagtttgaacgcttcaccacaggaaacacgcatactgcctacattatttgtaagcaggtggaagaagcatccaaacaactgggaattaatctatcaaacgcgactgttgcggtatgtggagcaactggggatattggtagtgccgttacacgctggctagatgcgagaacagatgtccaagaactcctgctaatcgcccgcgatcaagaacgtctcaaagagttgcaaggcgaactggggcgggggaaaatcatgggtttgacagaagcactaccccaagccgatgttgtagtttgggttgctagtatgcccagaggcgtggaaattgaccccaccactttgaaacaaccctgtttgttgattgatggtggctatcctaaaaacttagcaacaaaaattcaatatcctggcgtacacgtgttaaatggtgggattgtagagcattccctggatattgactggaaaattatgaaaatagtcaatatggacgtgccagcccgtcagttgtttgcctgttttgccgaatcaatgctactggaatttgagaagttatacacgaacttttcgtggggacggaatcagattaccgtagataaaatggagcagattggccgggtgtcagtaaaacatggatttagaccgttgttggtttag

SEQ ID NO: 149 - protein, 339 aa, Anabaena variabilis
MFGLIGHLTSLEHAQAVAQELGYPEYADQGLDFWCSAPPQIVDHIKVTSITGEIIEGRYVESCFLPEMLASRRIKAATRKVLNAMAHAQKHGIDITALGGFSSIIFENFKLEQFSQVRNVTLEFERFTTGNTHTAYIICRQVEQASQQLGIELSQATVAICGATGDIGSAVTRWLDAKTDVKELLLIARNQERLQELQSELGRGKIMSLDEALPQADIVVWVASMPKGVEINPQVLKQPCLLIDGGYPKNLGTKVQYPGVYVLNGGIVEHSLDIDWKIMKIVNMDVPARQLFACFAESMLLEFEKLYTNFSWGRNQITVDKMEQIGQASVKHGFRPLLV

SEQ ID NO: 150 - DNA, 1020 bp, Anabaena variabilis
atgtttggtctaattggacatctgacaagtttagaacacgctcaagcggtagctcaagaactgggatacccagaatacgccgaccaagggctagatttttggtgcagcgctccaccgcaaatagttgaccacattaaagttactagcattactggtgaaataattgaagggaggtatgtagaatcttgctttttaccagaaatgctagccagccgtaggattaaagccgcaacccgcaaagtcctcaatgctatggctcatgctcaaaaacatggcattgacatcaccgctttgggtggtttctcctccattatttttgaaaacttcaaattggaacagtttagccaagttcgtaatgtcacactagagtttgaacgcttcactacaggcaacactcacacagcttatatcatttgtcggcaggtagaacaagcatcacaacaactcggcattgaactctcccaagcaacagtagctatatgtggggctactggtgacattggtagtgcagttactcgctggctggatgccaaaacagacgtaaaagaattactgttaatcgcccgtaatcaagaacgtctccaagagttgcaaagcgagttgggacgcggtaaaatcatgagcctagatgaagcattgcctcaagctgatattgtagtttgggtagctagtatgcctaaaggcgtggaaattaatcctcaagttttgaaacaaccctgtttattgattgatggtggttatccgaaaaacttgggtacaaaagttcagtatcctggtgtttatgtactgaacggaggtatcgtcgaacattccctagatattgactggaaaatcatgaaaatagtcaatatggatgtacctgcacgccaattatttgcttgttttgcggaatctatgctcttggaatttgagaagttgtacacgaacttttcttgggggcgcaatcagattaccgtagacaaaatggagcagattggtcaagcatcagtgaaacatgggtttagaccactgctggtttag

SEQ ID NO: 151 - protein, 340 aa, Synechococcus elongatus
MFGLIGHLTSLEQARDVSRRMGYDEYADQGLEFWSSAPPQIVDEITVTSATGKVIHGRYIESCFLPEMLAARRFKTATRKVLNAMSHAQKHGIDISALGGFTSIIFENFDLASLRQVRDTTLEFERFTTGNTHTAYVICRQVEAAAKTLGIDITQATVAVVGATGDIGSAVCRWLDLKLGVGDLILTARNQERLDNLQAELGRGKILPLEAALPEADFIVWVASMPQGVVIDPATLKQPCVLIDGGYPKNLGSKVQGEGIYVLNGGVVEHCFDIDWQIMSAAEMARPERQMFACFAEAMLLEFEGWHTNFSWGRNQITIEKMEAIGEASVRHGFQPLALA

SEQ ID NO: 152 - DNA, 1026 bp, Synechococcus elongatus; identical to SEQ ID NO: 138

SEQ ID NO: 153 - protein, 339 aa, Nostoc sp. PCC 7120
MFGLIGHLTSLEHAQAVAQELGYPEYADQGLDFWCSAPPQIVDHIKVTSITGEIIEGRYVESCFLPEMLASRRIKAATRKVLNAMAHAQKNGIDITALGGFSSIIFENFKLEQFSQVRNVTLEFERFTTGNTHTAYIICRQVEQASQQLGIELSQATVAICGATGDIGSAVTRWLDAKTDVKELLLIARNQERLQELQSELGRGKIMSLDEALPQADIVVWVASMPKGVEINPQVLKQPCLLIDGGYPKNLGTKVQYPGVYVLNGGIVEHSLDIDWKIMKIVNMDVPARQLFACFAESMLLEFEKLYTNFSWGRNQITVDKMEQIGQASVKHGFRPLLV

SEQ ID NO: 154 - DNA, 1020 bp, Nostoc sp. PCC 7120
atgtttggtctaattggacatctgacaagtttagaacacgctcaagcggtagctcaagaactgggatacccagaatacgccgaccaagggctagatttttggtgtagcgctccaccgcaaatagttgaccacattaaagttactagtattactggtgaaataattgaagggaggtatgtagaatcttgctttttaccggagatgctagccagtcgtcggattaaagccgcaacccgcaaagtcctcaatgctatggctcatgctcaaaagaatggcattgatatcacagctttgggtggtttctcctccattatttttgaaaactttaaattggagcagtttagccaagttcgtaatgtgacactagagtttgaacgcttcactacaggcaacactcacacagcatatattatttgtcggcaggtagaacaagcatcacaacaactcggcattgaactctcccaagcaacagtagctatatgtggggctactggtgatattggtagtgcagttactcgctggctggatgctaaaacagacgtgaaagaattgctgttaatcgcccgtaatcaagaacgtctccaagagttgcaaagcgagctgggacgcggtaaaatcatgagccttgatgaagcactgccccaagctgatatcgtagtttgggtagccagtatgcctaaaggtgtggaaattaatcctcaagttttgaagcaaccctgtttgctgattgatgggggttatccgaaaaacttgggtacaaaagttcagtatcctggtgtttatgtactgaacggcggtatcgtcgaacattcgctggatattgactggaaaatcatgaaaatagtcaatatggatgtacctgcacgccaattatttgcttgttttgcggaatctatgctcttggaatttgagaagttgtacacgaacttttcttgggggcgcaatcagattaccgtagacaaaatggagcagattggtcaagcatcagtgaaacatgggtttagaccactgctggtttag

SEQ ID NO: 155 - protein, 28 aa, Artificial sequence
  Synthetic polypeptide
  VARIANT (3)..(3): Xaa is any amino acid
  VARIANT (9)..(12): Xaa is any amino acid
  VARIANT (14)..(25): Xaa is any amino acid
  VARIANT (26)..(26): Xaa is any amino acid and can be present or absent
GAXGDIGSXXXXWXXXXXXXXXXXXXAR

SEQ ID NO: 156 - protein, 34 aa, Artificial sequence
  Synthetic polypeptide
  VARIANT (5)..(5): Xaa is Val or Ile
  VARIANT (6)..(6): Xaa is any amino acid
  VARIANT (17)..(17): Xaa is Cys or Thr
  VARIANT (21)..(21): Xaa is Asp or Ile
  VARIANT (22)..(22): Xaa is any amino acid
  VARIANT (24)..(27): Xaa is any amino acid
  VARIANT (28)..(28): Xaa is Asp or Glu
  VARIANT (30)..(30): Xaa is Ile, Leu, or Phe
  VARIANT (32)..(32): Xaa is Thr, Ile, or Val
ATVAXXGATGDIGSAVXRWLXXKXXXXXLXLXAR

SEQ ID NO: 157 - protein, 11 aa, Artificial sequence
  Synthetic polypeptide
  VARIANT (1)..(1): Xaa is any amino acid except Lys
  VARIANT (3)..(3): Xaa is any amino acid
  VARIANT (4)..(4): Xaa is Phe, Leu, or Trp
  VARIANT (5)..(5): Xaa is any amino acid
XLXXXRFTTGN

SEQ ID NO: 158 - protein, 14 aa, Artificial sequence
  Synthetic polypeptide
  VARIANT (8)..(13): Xaa is any amino acid
MFGLIGHXXXXXXA

SEQ ID NO: 159 - protein, 19 aa, Artificial sequence
  Synthetic polypeptide
  VARIANT (2)..(2): Xaa is Asp or Glu
  VARIANT (3)..(3): Xaa is Phe, Leu, Val, or Met
  VARIANT (5)..(5): Xaa is Cys or Ser
  VARIANT (6)..(6): Xaa is any amino acid
  VARIANT (10)..(10): Xaa is Gln or Val
  VARIANT (11)..(11): Xaa is any amino acid
  VARIANT (12)..(12): Xaa is Leu or Val
  VARIANT (13)..(13): Xaa is Asp or Glu
  VARIANT (14)..(16): Xaa is any amino acid
  VARIANT (17)..(17): Xaa is Val or Ile
  VARIANT (18)..(18): Xaa is any amino acid
LXXWXXAPPXXXXXXXXXS

SEQ ID NO: 160 - protein, 21 aa, Artificial sequence
  Synthetic polypeptide
  VARIANT (2)..(3): Xaa is any amino acid
  VARIANT (5)..(6): Xaa is any amino acid
  VARIANT (8)..(8): Xaa is any amino acid
  VARIANT (10)..(10): Xaa is any amino acid
  VARIANT (12)..(13): Xaa is any amino acid
  VARIANT (15)..(15): Xaa is any amino acid
  VARIANT (17)..(17): Xaa is any amino acid
SXXGXXIXGXYXXSXFXPEML

SEQ ID NO: 161 - protein, 27 aa, Artificial sequence
  Synthetic polypeptide
  VARIANT (2)..(2): Xaa is any amino acid
  VARIANT (4)..(4): Xaa is any amino acid
  VARIANT (7)..(9): Xaa is any amino acid
  VARIANT (12)..(14): Xaa is any amino acid
  VARIANT (16)..(20): Xaa is any amino acid
  VARIANT (22)..(23): Xaa is any amino acid
KXAXRKXXXAMXXXQXXXXXIXXLGGF

SEQ ID NO: 162 - protein, 14 aa, Artificial sequence
  Synthetic polypeptide
  VARIANT (2)..(2): Xaa is Leu, Val, or Met
  VARIANT (3)..(4): Xaa is any amino acid
  VARIANT (5)..(5): Xaa is Ala or Ser
  VARIANT (6)..(6): Xaa is Asp or Asn
  VARIANT (7)..(7): Xaa is any amino acid
  VARIANT (8)..(9): Xaa is Val or Ile
  VARIANT (14)..(14): Xaa is Leu, Met, or Ile
AXXXXXXXXWVASX

SEQ ID NO: 163 - protein, 12 aa, Artificial sequence
  Synthetic polypeptide
  VARIANT (2)..(5): Xaa is any amino acid
PXXXXDGGYPKN

SEQ ID NO: 164 - protein, 25 aa, Artificial sequence
  Synthetic polypeptide
  VARIANT (8)..(8): Xaa is any amino acid
  VARIANT (10)..(16): Xaa is any amino acid
  VARIANT (19)..(20): Xaa is any amino acid
  VARIANT (22)..(23): Xaa is any amino acid
NFSWGRNXIXXXXXXXIGXXSXXHG

SEQ ID NO: 165 - protein, 9 aa, Artificial sequence
  Synthetic polypeptide
FTTGNTHTA

SEQ ID NO: 166 - protein, 231 aa, Synechococcus elongatus
MPQLEASLELDFQSESYKDAYSRINAIVIEGEQEAFDNYNRLAEMLPDQRDELHKLAKMEQRHMKGFMACGKNLSVTPDMGFAQKFFERLHENFKAAAAEGKVVTCLLIQSLIIECFAIAAYNIYIPVADAFARKITEGVVRDEYLHRNFGEEWLKANFDASKAELEEANRQNLPLVWLMLNEVADDARELGMERESLVEDFMIAYGEALENIGFTTREIMRMSAYGLAAV

SEQ ID NO: 167 - DNA, 696 bp, Synechococcus elongatus
atgccgcagcttgaagccagccttgaactggactttcaaagcgagtcctacaaagacgcttacagccgcatcaacgcgatcgtgattgaaggcgaacaagaggcgttcgacaactacaatcgccttgctgagatgctgcccgaccagcgggatgagcttcacaagctagccaagatggaacagcgccacatgaaaggctttatggcctgtggcaaaaatctctccgtcactcctgacatgggttttgcccagaaatttttcgagcgcttgcacgagaacttcaaagcggcggctgcggaaggcaaggtcgtcacctgcctactgattcaatcgctaatcatcgagtgctttgcgatcgcggcttacaacatctacatcccagtggcggatgcttttgcccgcaaaatcacggagggggtcgtgcgcgacgaatacctgcaccgcaacttcggtgaagagtggctgaaggcgaattttgatgcttccaaagccgaactggaagaagccaatcgtcagaacctgcccttggtttggctaatgctcaacgaagtggccgatgatgctcgcgaactcgggatggagcgtgagtcgctcgtcgaggactttatgattgcctacggtgaagctctggaaaacatcggcttcacaacgcgcgaaatcatgcgtatgtccgcctatggccttgcggccgtttga

SEQ ID NO: 168 - protein, 231 aa, Synechocystis sp. PCC6803
MPELAVRTEFDYSSEIYKDAYSRINAIVIEGEQEAYSNYLQMAELLPEDKEELTRLAKMENRHKKGFQACGNNLQVNPDMPYAQEFFAGLHGNFQHAFSEGKVVTCLLIQALIIEAFAIAAYNIYIPVADDFARKITEGVVKDEYTHLNYGEEWLKANFATAKEELEQANKENLPLVWKMLNQVQGDAKVLGMEKEALVEDFMISYGEALSNIGFSTREIMRMSSYGLAGV

SEQ ID NO: 169 - DNA, 696 bp, Synechocystis sp. PCC6803
atgcccgagcttgctgtccgcaccgaatttgactattccagcgaaatttacaaagacgcctatagccgcatcaacgccattgtcattgaaggcgaacaggaagcctacagcaactacctccagatggcggaactcttgccggaagacaaagaagagttgacccgcttggccaaaatggaaaaccgccataaaaaaggtttccaagcctgtggcaacaacctccaagtgaaccctgatatgccctatgcccaggaatttttcgccggtctccatggcaatttccagcacgcttttagcgaagggaaagttgttacctgtttattgatccaggctttgattatcgaagcttttgcgatcgccgcctataacatatatatccctgtggcggacgactttgctcggaaaatcactgagggcgtagtcaaggacgaatacacccacctcaactacggggaagaatggctaaaggccaactttgccaccgctaaggaagaactggagcaggccaacaaagaaaacctacccttagtgtggaaaatgctcaaccaagtgcagggggacgccaaggtattgggcatggaaaaagaagccctagtggaagattttatgatcagctacggcgaagccctcagtaacatcggcttcagcaccagggaaattatgcgtatgtcttcctacggtttggccggagtctag

SEQ ID NO: 170 - protein, 232 aa, Nostoc punctiforme
MQQLTDQSKELDFKSETYKDAYSRINAIVIEGEQEAHENYITLAQLLPESHDELIRLSKMESRHKKGFEACGRNLAVTPDLQFAKEFFSGLHQNFQTAAAEGKVVTCLLIQSLIIECFAIAAYNIYIPVADDFARKITEGVVKEEYSHLNFGEVWLKEHFAESKAELELANRQNLPIVWKMLNQVEGDAHTMAMEKDALVEDFMIQYGEALSNIGFSTRDIMRLSAYGLIGA

SEQ ID NO: 171 - DNA, 699 bp, Nostoc punctiforme
atgcagcagcttacagaccaatctaaagaattagatttcaagagcgaaacatacaaagatgcttatagccggattaatgcgatcgtgattgaaggggaacaagaagcccatgaaaattacatcacactagcccaactgctgccagaatctcatgatgaattgattcgcctatccaagatggaaagccgccataagaaaggatttgaagcttgtgggcgcaatttagctgttaccccagatttgcaatttgccaaagagtttttctccggcctacaccaaaattttcaaacagctgccgcagaagggaaagtggttacttgtctgttgattcagtctttaattattgaatgttttgcgatcgcagcatataacatttacatccccgttgccgacgatttcgcccgtaaaattactgaaggagtagttaaagaagaatacagccacctcaattttggagaagtttggttgaaagaacactttgcagaatccaaagctgaacttgaacttgcaaatcgccagaacctacccatcgtctggaaaatgctcaaccaagtagaaggtgatgcccacacaatggcaatggaaaaagatgctttggtagaagacttcatgattcagtatggtgaagcattgagtaacattggtttttcgactcgcgatattatgcgcttgtcagcctacggactcataggtgcttaa

SEQ ID NO: 172 - protein, 231 aa, Nostoc sp. PCC 7120
MQQVAADLEIDFKSEKYKDAYSRINAIVIEGEQEAYENYIQLSQLLPDDKEDLIRLSKMESRHKKGFEACGRNLQVSPDMEFAKEFFAGLHGNFQKAAAEGKIVTCLLIQSLIIECFAIAAYNIYIPVADDFARKITEGVVKDEYSHLNFGEVWLQKNFAQSKAELEEANRHNLPIVWKMLNQVADDAAVLAMEKEALVEDFMIQYGEALSNIGFTTRDIMRMSAYGLTAA

SEQ ID NO: 173 - DNA, 696 bp, Nostoc sp. PCC 7120
atgcagcaggttgcagccgatttagaaattgatttcaagagcgaaaaatataaagatgcctatagtcgcataaatgcgatcgtgattgaaggggaacaagaagcatacgagaattacattcaactatcccaactgctgccagacgataaagaagacctaattcgcctctcgaaaatggaaagccgtcacaaaaaaggatttgaagcttgtggacggaacctacaagtatcaccagatatggagtttgccaaagaattctttgctggactacacggtaacttccaaaaagcggcggctgaaggtaaaatcgttacctgtctattgattcagtccctgattattgaatgttttgcgatcgccgcatacaatatctacattcccgttgctgacgattttgctcgtaaaatcactgagggtgtagtcaaagatgaatacagccacctcaacttcggcgaagtttggttacagaaaaattttgcccaatccaaagcagaattagaagaagctaatcgtcataatcttcccatagtttggaaaatgctcaatcaagtcgcggatgatgccgcagtcttagctatggaaaaagaagccctagtcgaagattttatgattcagtacggcgaagcgttaagtaatattggcttcacaaccagagatattatgcggatgtcagcctacggacttacagcagcttaa

SEQ ID NO: 174 - protein, 231 aa, Acaryochloris marina
MPQTQAISEIDFYSDTYKDAYSRIDGIVIEGEQEAHENYIRLGEMLPEHQDDFIRLSKMEARHKKGFEACGRNLKVTCDLDFARRFFSDLHKNFQDAAAEDKVPTCLVIQSLIIECFAIAAYNIYIPVADDFARKITESVVKDEYQHLNYGEEWLKAHFDDVKAEIQEANRKNLPIVWRMLNEVDKDAAVLGMEKEALVEDFMIQYGEALSNIGFSTGEIMRMSAYGLVAA

SEQ ID NO: 175 - DNA, 696 bp, Acaryochloris marina
atgccccaaactcaggctatttcagaaattgacttctatagtgacacctacaaagatgcttacagtcgtattgacggcattgtgatcgaaggtgagcaagaagcgcatgaaaactatattcgtcttggcgaaatgctgcctgagcaccaagacgactttatccgcctgtccaagatggaagcccgtcataagaaagggtttgaagcctgcggtcgcaacttaaaagtaacctgcgatctagactttgcccggcgtttcttttccgacttacacaagaattttcaagatgctgcagctgaggataaagtgccaacttgcttagtgattcagtccttgatcattgagtgttttgcgatcgcagcttacaacatctatatccccgtcgctgatgactttgcccgtaagattacagagtctgtggttaaggatgagtatcaacacctcaattatggtgaagagtggcttaaagctcacttcgatgatgtgaaagcagaaatccaagaagctaatcgcaaaaacctccccatcgtttggagaatgctgaacgaagtggacaaggatgcggccgttttaggaatggaaaaagaagccctggttgaagacttcatgatccagtatggtgaagcccttagcaatattggtttctctacaggcgaaattatgcggatgtctgcctatggtcttgtggctgcgtaa

SEQ ID NO: 176 - protein, 231 aa, Thermosynechococcus elongatus
MTTATATPVLDYHSDRYKDAYSRINAIVIEGEQEAHDNYIDLAKLLPQHQEELTRLAKMEARHKKGFEACGRNLSVTPDMEFAKAFFEKLRANFQRALAEGKTATCLLIQALIIESFAIAAYNIYIPMADPFARKITESVVKDEYSHLNFGEIWLKEHFESVKGELEEANRANLPLVWKMLNQVEADAKVLGMEKDALVEDFMIQYSGALENIGFTTREIMKMSVYGLTGA

SEQ ID NO: 177 - DNA, 696 bp, Thermosynechococcus elongatus
atgacaacggctaccgctacacctgttttggactaccatagcgatcgctacaaggatgcctacagccgcattaacgccattgtcattgaaggtgaacaggaagctcacgataactatatcgatttagccaagctgctgccacaacaccaagaggaactcacccgccttgccaagatggaagctcgccacaaaaaggggtttgaggcctgtggtcgcaacctgagcgtaacgccagatatggaatttgccaaagccttctttgaaaaactgcgcgctaactttcagagggctctggcggagggaaaaactgcgacttgtcttctgattcaagctttgatcatcgaatcctttgcgatcgcggcctacaacatctacatcccaatggcggatcctttcgcccgtaaaattactgagagtgttgttaaggacgaatacagccacctcaactttggcgaaatctggctcaaggaacactttgaaagcgtcaaaggagagctcgaagaagccaatcgcgccaatttacccttggtctggaaaatgctcaaccaagtggaagcagatgccaaagtgctcggcatggaaaaagatgcccttgtggaagacttcatgattcagtacagtggtgccctagaaaatatcggctttaccacccgcgaaattatgaagatgtcagtttatggcctcactggggcataa

SEQ ID NO: 178 - protein, 243 aa, Synechococcus sp. JA-3-3A
MAPANVLPNTPPSPTDGGGTALDYSSPRYRQAYSRINGIVIEGEQEAHDNYLKLAEMLPEAAEELRKLAKMELRHMKGFQACGKNLQVEPDVEFARAFFAPLRDNFQSAAAAGDLVSCFVIQSLIIECFAIAAYNIYIPVADDFARKITEGVVKDEYLHLNFGERWLGEHFAEVKAQIEAANAQNLPLVRQMLQQVEADVEAIYMDREAIVEDFMIAYGEALASIGFNTREVMRLSAQGLRAA

SEQ ID NO: 179 - DNA, 732 bp, Synechococcus sp. JA-3-3A
atggccccagcgaacgtcctgcccaacacccccccgtcccccactgatgggggcggcactgccctagactacagcagcccaaggtatcggcaggcctactcccgcatcaacggtattgttatcgaaggcgaacaagaagcccacgacaactacctcaagctggccgaaatgctgccggaagctgcagaggagctgcgcaagctggccaagatggaattgcgccacatgaaaggcttccaggcctgcggcaaaaacctgcaggtggaacccgatgtggagtttgcccgcgcctttttcgcgcccttgcgggacaatttccaaagcgccgcagcggcaggggatctggtctcctgttttgtcattcagtctttgatcatcgagtgctttgccattgccgcctacaacatctacatcccggttgccgatgactttgcccgcaagatcaccgagggggtagttaaggacgagtatctgcacctcaattttggggagcgctggctgggcgagcactttgccgaggttaaagcccagatcgaagcagccaacgcccaaaatctgcctctagttcggcagatgctgcagcaggtagaggcggatgtggaagccatttacatggatcgcgaggccattgtagaagacttcatgatcgcctacggcgaggccctggccagcatcggcttcaacacccgcgaggtaatgcgcctctcggcccagggtctgcgggccgcctga

SEQ ID NO: 180 - protein, 235 aa, Gloeobacter violaceus
MNRTAPSSAALDYRSDTYRDAYSRINAIVLEGEREAHANYLTLAEMLPDHAEALKKLAAMENRHFKGFQSCARNLEVTPDDPFARAYFEQLDGNFQQAAAEGDLTTCMVIQALIIECFAIAAYNVYIPVADAFARKVTEGVVKDEYTHLNFGQQWLKERFVTVREGIERANAQNLPIVWRMLNAVEADTEVLQMDKEAIVEDFMIAYGEALGDIGFSMRDVMKMSARGLASAPRQ

SEQ ID NO: 181 - DNA, 708 bp, Gloeobacter violaceus
gtgaaccgaaccgcaccgtccagcgccgcgcttgattaccgctccgacacctaccgcgatgcgtactcccgcatcaatgccatcgtccttgaaggcgagcgggaagcccacgccaactaccttaccctcgctgagatgctgccggaccatgccgaggcgctcaaaaaactggccgcgatggaaaatcgccacttcaaaggcttccagtcctgcgcccgcaacctcgaagtcacgccggacgacccgtttgcaagggcctacttcgaacagctcgacggcaactttcagcaggcggcggcagaaggtgaccttaccacctgcatggtcatccaggcactgatcatcgagtgcttcgcaattgcggcctacaacgtctacattccggtggccgacgcgtttgcccgcaaggtgaccgagggcgtcgtcaaggacgagtacacccacctcaactttgggcagcagtggctcaaagagcgcttcgtgaccgtgcgcgagggcatcgagcgcgccaacgcccagaatctgcccatcgtctggcggatgctcaacgccgtcgaagcggacaccgaagtgctgcagatggataaagaagcgatcgtcgaagactttatgatcgcctacggtgaagccttgggcgacatcggtttttcgatgcgcgacgtgatgaagatgtccgcccgcggccttgcctctgccccccgccagtga

SEQ ID NO: 182 - protein, 243 aa, Prochlorococcus marinus
MPTLEMPVAAVLDSTVGSSEALPDFTSDRYKDAYSRINAIVIEGEQEAHDNYIAIGTLLPDHVEELKRLAKMEMRHKKGFTACGKNLGVEADMDFAREFFAPLRDNFQTALGQGKTPTCLLIQALLIEAFAISAYHTYIPVSDPFARKITEGVVKDEYTHLNYGEAWLKANLESCREELLEANRENLPLIRRMLDQVAGDAAVLQMDKEDLIEDFLIAYQESLTEIGFNTREITRMAAAALVS

SEQ ID NO: 183 - DNA, 732 bp, Prochlorococcus marinus
atgcctacgcttgagatgcctgtggcagctgttcttgacagcactgttggatcttcagaagccctgccagacttcacttcagatagatataaggatgcatacagcagaatcaacgcaatagtcattgagggcgaacaggaagcccatgacaattacatcgcgattggcacgctgcttcccgatcatgtcgaagagctcaagcggcttgccaagatggagatgaggcacaagaagggctttacagcttgcggcaagaaccttggcgttgaggctgacatggacttcgcaagggagttttttgctcctttgcgtgacaacttccagacagctttagggcaggggaaaacacctacatgcttgctgatccaggcgctcttgattgaagcctttgctatttcggcttatcacacctatatccctgtttctgacccctttgctcgcaagattactgaaggtgtcgtgaaggacgagtacacacacctcaattatggcgaggcttggctcaaggccaatctggagagttgccgtgaggagttgcttgaggccaatcgcgagaacctgcctctgattcgccggatgcttgatcaggtagcaggtgatgctgccgtgctgcagatggataaggaagatctgattgaggatttcttaatcgcctaccaggaatctctcactgagattggctttaacactcgtgaaattacccgtatggcagcggcagctcttgtgagctga

SEQ ID NO: 184 - protein, 238 aa, Prochlorococcus marinus subsp. pastoris str. CCMP1986
MQTLESNKKTNLENSIDLPDFTTDSYKDAYSRINAIVIEGEQEAHDNYISLATLIPNELEELTKLAKMELKHKRGFTACGRNLGVQADMIFAKEFFSKLHGNFQVALSNGKTTTCLLIQAILIEAFAISAYHVYIRVADPFAKKITQGVVKDEYLHLNYGQEWLKENLATCKDELMEANKVNLPLIKKMLDQVSEDASVLAMDREELMEEFMIAYQDTLLEIGLDNREIARMAMAAIV

SEQ ID NO: 185 - DNA, 717 bp, Prochlorococcus marinus subsp. pastoris str. CCMP1986
atgcaaacactcgaatctaataaaaaaactaatctagaaaattctattgatttacccgattttactactgattcttacaaagacgcttatagcaggataaatgcaatagttattgaaggtgaacaagaggctcatgataattacatttccttagcaacattaattcctaacgaattagaagagttaactaaattagcgaaaatggagcttaagcacaaaagaggctttactgcatgtggaagaaatctaggtgttcaagctgacatgatttttgctaaagaattcttttccaaattacatggtaattttcaggttgcgttatctaatggcaagacaactacatgcctattaatacaggcaattttaattgaagcttttgctatatccgcgtatcacgtttacataagagttgctgatcctttcgcgaaaaaaattacccaaggtgttgttaaagatgaatatcttcatttaaattatggacaagaatggctaaaagaaaatttagcgacttgtaaagatgagctaatggaagcaaataaggttaaccttccattaatcaagaagatgttagatcaagtctcggaagatgcttcagtactagctatggatagggaagaattaatggaagaattcatgattgcctatcaggacactctccttgaaataggtttagataatagagaaattgcaagaatggcaatggctgctatagtttaa

SEQ ID NO: 186 - protein, 241 aa, Prochlorococcus marinus str. NATL2A
MQAFASNNLTVEKEELSSNSLPDFTSESYKDAYSRINAVVIEGEQEAYSNFLDLAKLIPEHADELVRLGKMEKKHMNGFCACGRNLAVKPDMPFAKTFFSKLHNNFLEAFKVGDTTTCLLIQCILIESFAISAYHVYIRVADPFAKRITEGVVQDEYLHLNYGQEWLKANLETVKKDLMRANKENLPLIKSMLDEVSNDAEVLHMDKEELMEEFMIAYQDSLLEIGLDNREIARMALAAVI

SEQ ID NO: 187 - DNA, 726 bp, Prochlorococcus marinus str. NATL2A
atgcaagcttttgcatccaacaatttaaccgtagaaaaagaagagctaagttctaactctcttccagatttcacctcagaatcttacaaagatgcttacagcagaatcaatgcagttgtaattgaaggggagcaagaagcttattctaattttcttgatctcgctaaattgattcctgaacatgcagatgagcttgtgaggctagggaagatggagaaaaagcatatgaatggtttttgtgcttgcgggagaaatcttgctgtaaagcctgatatgccttttgcaaagacctttttctcaaaactccataataattttttagaggctttcaaagtaggagatacgactacctgtctcctaattcaatgcatcttgattgaatcttttgcaatatccgcatatcacgtttatatacgtgttgctgatccattcgccaaaagaatcacagagggtgttgtccaagatgaatacttgcatttgaactatggtcaagaatggcttaaggccaatctagagacagttaagaaagatcttatgagggctaataaggaaaacttgcctcttataaagtccatgctcgatgaagtttcaaacgacgccgaagtccttcatatggataaagaagagttaatggaggaatttatgattgcttatcaagattcccttcttgaaataggtcttgataatagagaaattgcaagaatggctcttgcagcggtgatataa

SEQ ID NO: 188 - protein, 243 aa, Synechococcus sp. RS9917
MPTLETSEVAVLEDSMASGSRLPDFTSEAYKDAYSRINAIVIEGEQEAHDNYIALGTLIPEQKDELARLARMEMKHMKGFTSCGRNLGVEADLPFAKEFFAPLHGNFQAALQEGKVVTCLLIQALLIEAFAISAYHIYIPVADPFARKITEGVVKDEYTHLNYGQEWLKANFEASKDELMEANKANLPLIRSMLEQVAADAAVLQMEKEDLIEDFLIAYQEALCEIGFSSRDIARMAAAALAV

SEQ ID NO: 189 - DNA, 732 bp, Synechococcus sp. RS9917
atgccgacccttgagacgtctgaggtcgccgttcttgaagactcgatggcttcaggctcccggctgcctgatttcaccagcgaggcttacaaggacgcctacagccgcatcaatgcgatcgtgatcgagggtgagcaggaagcgcacgacaactacatcgccctcggcacgctgatccccgagcagaaggatgagctggcccgtctcgcccgcatggagatgaagcacatgaaggggttcacctcctgtggccgcaatctcggcgtggaggcagaccttccctttgctaaggaattcttcgcccccctgcacgggaacttccaggcagctctccaggagggcaaggtggtgacctgcctgttgattcaggcgctgctgattgaagcgttcgccatttccgcctatcacatctacatcccggtggcggatcccttcgctcgcaagatcactgaaggtgtggtgaaggatgagtacacccacctcaattacggccaggaatggctgaaggccaattttgaggccagcaaggatgagctgatggaggccaacaaggccaatctgcctctgatccgctcgatgctggagcaggtggcagccgacgccgccgtgctgcagatggaaaaggaagatctgatcgaagatttcctgatcgcttaccaggaggccctctgcgagatcggtttcagctcccgtgacattgctcgcatggccgccgctgccctcgcggtctga

SEQ ID NO: 190 - protein, 226 aa, Synechococcus sp. RS9917
MTQLDFASAAYREAYSRINGVVIVGEGLANRHFQMLARRIPADRDELQRLGRMEGDHASAFVGCGRNLGVVADLPLARRLFQPLHDLFKRHDHDGNRAECLVIQGLIVECFAVAAYRHYLPVADAYARPITAAVMNDESEHLDYAETWLQRHFDQVKARVSAVVVEALPLTLAMLQSLAADMRQIGMDPVETLASFSELFREALESVGFEAVEARRLLMRAAARMV

SEQ ID NO: 191 - DNA, 681 bp, Synechococcus sp. RS9917
atgacccagctcgactttgccagtgcggcctaccgcgaggcctacagccggatcaacggcgttgtgattgtgggcgaaggtctcgccaatcgccatttccagatgttggcgcggcgcattcccgctgatcgcgacgagctgcagcggctcggacgcatggagggagaccatgccagcgcctttgtgggctgtggtcgcaacctcggtgtggtggccgatctgcccctggcccggcgcctgtttcagcccctccatgatctgttcaaacgccacgaccacgacggcaatcgggccgaatgcctggtgatccaggggttgatcgtggaatgtttcgccgtggcggcttaccgccactacctgccggtggccgatgcctacgcccggccgatcaccgcagcggtgatgaacgatgaatcggaacacctcgactacgctgagacctggctgcagcgccatttcgatcaggtgaaggcccgggtcagcgcggtggtggtggaggcgttgccgctcaccctggcgatgttgcaatcgcttgctgcagacatgcgacagatcggcatggatccggtggagaccctggccagcttcagtgaactgtttcgggaagcgttggaatcggtggggtttgaggctgtggaggccaggcgactgctgatgcgagcggccgcccggatggtctga

SEQ ID NO: 192 - protein, 231 aa, Cyanothece sp. ATCC51142
MQELALRSELDFNSETYKDAYSRINAIVIEGEQEAYQNYLDMAQLLPEDEAELIRLSKMENRHKKGFQACGKNLNVTPDMDYAQQFFAELHGNFQKAKAEGKIVTCLLIQSLIIEAFAIAAYNIYIPVADPFARKITEGVVKDEYTHLNFGEVWLKEHFEASKAELEDANKENLPLVWQMLNQVEKDAEVLGMEKEALVEDFMISYGEALSNIGFSTREIMKMSAYGLRAA

SEQ ID NO: 193 - DNA, 696 bp, Cyanothece sp. ATCC51142
atgcaagagcttgctttacgctcagagcttgattttaacagcgaaacctataaagatgcttacagtcgcatcaatgctattgtcattgaaggggaacaagaagcctatcaaaattatcttgatatggcgcaacttctcccagaagacgaggctgagttaattcgtctctccaagatggaaaaccgtcacaaaaaaggctttcaagcctgtggcaagaatttgaatgtgaccccagatatggactacgctcaacaattttttgctgaacttcatggcaacttccaaaaggcaaaagccgaaggcaaaattgtcacttgcttattaattcaatctttgatcatcgaagcctttgcgatcgccgcttataatatttatattcctgtggcagatccctttgctcgtaaaatcaccgaaggggtagttaaggatgaatatacccacctcaattttggggaagtctggttaaaagagcattttgaagcctctaaagcagaattagaagacgcaaataaagaaaatttaccccttgtttggcaaatgctcaaccaagttgaaaaagatgccgaagtgttagggatggagaaagaagccttagtggaagatttcatgattagttatggagaagctttaagtaatattggtttctctacccgtgagatcatgaaaatgtctgcttacgggctacgggctgcttaa

SEQ ID NO: 194 - protein, 231 aa, Cyanothece sp. PCC7245
MPQVQSPSAIDFYSETYQDAYSRIDAIVIEGEQEAHDNYLKLTELLPDCQEDLVRLAKMEARHKKGFEACGRNLKVTPDMEFAQQFFADLHNNFQKAAAANKIATCLVIQALIIECFAIAAYNIYIPVADDFARKITENVVKDEYTHLNFGEEWLKANFDSQREEVEAANRENLPIVWRMLNQVETDAHVLGMEKEALVESFMIQYGEALENIGFSTREIMRMSVYGLSAA

SEQ ID NO: 195 - DNA, 696 bp, Cyanothece sp. PCC7245
atgcctcaagtgcagtccccatcggctatagacttctacagtgagacctaccaggatgcttacagccgcattgatgcgatcgtgatcgagggagaacaggaagcccacgacaattacctgaagctgacggaactgctgccggattgtcaagaagatctggtccggctggccaaaatggaagcccgtcacaaaaaagggtttgaagcttgtggccgcaatctcaaggtcacacccgatatggagtttgctcaacagttctttgctgacctgcacaacaatttccagaaagctgctgcggccaacaaaattgccacctgtctggtgatccaggccctgattattgagtgctttgccatcgccgcttataacatctatattcctgtcgctgatgactttgcccgcaaaattaccgaaaacgtggtcaaagacgaatacacccacctcaactttggtgaagagtggctcaaagctaactttgatagccagcgggaagaagtggaagcggccaaccgggaaaacctgccgatcgtctggcggatgctcaatcaggtagagactgatgctcacgttttaggtatggaaaaagaggctttagtggaaagcttcatgatccaatatggtgaagccctggaaaatattggtttctcgacccgtgagatcatgcgcatgtccgtttacggcctctctgcggcataa

SEQ ID NO: 196 - protein, 233 aa, Cyanothece sp. PCC7245
MSDCATNPALDYYSETYRNAYRRVNGIVIEGEKQAYDNFIRLAELLPEYQAELTRLAKMEARHQKSFVACGQNLKVSPDLDFAAQFFAELHQIFASAANAGQVATCLVVQALIIECFAIAAYNTYLPVADEFARKVTASVVQDEYSHLNFGEVWLQNAFEQCKDEIITANRLALPLIWKMLNQVTGELRILGMDKASLVEDFSTRYGEALGQIGFKLSEILSLSVQGLQAVTP

SEQ ID NO: 197 - DNA, 702 bp, Cyanothece sp. PCC7245
atgtctgattgcgccacgaacccagccctcgactattacagtgaaacctaccgcaatgcttaccggcgggtgaacggtattgtgattgaaggcgagaagcaagcctacgacaactttatccgcttagctgagctgctcccagagtatcaagcggaattaacccgtctggctaaaatggaagcccgccaccagaagagctttgttgcctgtggccaaaatctcaaggttagcccggacttagactttgcggcacagttttttgctgaactgcatcaaatttttgcatctgcagcaaatgcgggccaggtggctacctgtctggttgtgcaagccctgatcattgaatgctttgcgatcgccgcctacaatacctatttgccagtagcggatgaatttgcccgtaaagtcaccgcatccgttgttcaggacgagtacagccacctaaactttggtgaagtctggctgcagaatgcgtttgagcagtgtaaagacgaaattatcacagctaaccgtcttgctctgccgctgatctggaaaatgctcaaccaggtgacaggcgaattgcgcattctgggcatggacaaagcttctctggtagaagactttagcactcgctatggagaggccctgggccagattggtttcaaactatctgaaattctctccctgtccgttcagggtttacaggcggttacgccttag

SEQ ID NO: 198 - protein, 231 aa, Anabaena variabilis
MQQVAADLEIDFKSEKYKDAYSRINAIVIEGEQEAYENYIQLSQLLPDDKEDLIRLSKMESRHKKGFEACGRNLQVSPDIEFAKEFFAGLHGNFQKAAAEGKVVTCLLIQSLIIECFAIAAYNIYIPVADDFARKITEGVVKDEYSHLNFGEVWLQKNFAQSKAELEEANRHNLPIVWKMLNQVADDAAVLAMEKEALVEDFMIQYGEALSNIGFTTRDIMRMSAYGLTAA

SEQ ID NO: 199 - DNA, 696 bp, Anabaena variabilis
atgcagcaggttgcagccgatttagaaatcgatttcaagagcgaaaaatataaagatgcctatagtcgcataaatgcgatcgtgattgaaggggaacaagaagcatatgagaattacattcaactatcccaactgctgccagacgataaagaagacctaattcgcctctcgaaaatggaaagtcgccacaaaaaaggatttgaagcttgtggacggaacctgcaagtatccccagacatagagttcgctaaagaattctttgccgggctacacggtaatttccaaaaagcggcagctgaaggtaaagttgtcacttgcctattgattcaatccctgattattgaatgttttgcgatcgccgcatacaatatctacatccccgtggctgacgatttcgcccgtaaaatcactgagggtgtagttaaagatgaatacagtcacctcaacttcggcgaagtttggttacagaaaaatttcgctcaatcaaaagcagaactagaagaagctaatcgtcataatcttcccatagtctggaaaatgctcaatcaagttgccgatgatgcggcagtcttagctatggaaaaagaagccctagtggaagattttatgattcagtacggcgaagcactaagtaatattggcttcacaaccagagatattatgcggatgtcagcctacggactcacagcagcttaa

SEQ ID NO: 200 - protein, 254 aa, Synechococcus elongatus
MRTPWDPPNPTFSLSSVSGDRRLMPQLEASLELDFQSESYKDAYSRINAIVIEGEQEAFDNYNRLAEMLPDQRDELHKLAKMEQRHMKGFMACGKNLSVTPDMGFAQKFFERLHENFKAAAAEGKVVTCLLIQSLIIECFAIAAYNIYIPVADAFARKITEGVVRDEYLHRNFGEEWLKANFDASKAELEEANRQNLPLVWLMLNEVADDARELGMERESLVEDFMIAYGEALENIGFTTREIMRMSAYGLAAV

SEQ ID NO: 201 - DNA, 765 bp, Synechococcus elongatus
gtgcgtaccccctgggatccaccaaatcccacattctccctctcatccgtgtcaggagaccgcagactcatgccgcagcttgaagccagccttgaactggactttcaaagcgagtcctacaaagacgcttacagccgcatcaacgcgatcgtgattgaaggcgaacaagaggcgttcgacaactacaatcgccttgctgagatgctgcccgaccagcgggatgagcttcacaagctagccaagatggaacagcgccacatgaaaggctttatggcctgtggcaaaaatctctccgtcactcctgacatgggttttgcccagaaatttttcgagcgcttgcacgagaacttcaaagcggcggctgcggaaggcaaggtcgtcacctgcctactgattcaatcgctaatcatcgagtgctttgcgatcgcggcttacaacatctacatcccagtggcggatgcttttgcccgcaaaatcacggagggggtcgtgcgcgacgaatacctgcaccgcaacttcggtgaagagtggctgaaggcgaattttgatgcttccaaagccgaactggaagaagccaatcgtcagaacctgcccttggtttggctaatgctcaacgaagtggccgatgatgctcgcgaactcgggatggagcgtgagtcgctcgtcgaggactttatgattgcctacggtgaagctctggaaaacatcggcttcacaacgcgcgaaatcatgcgtatgtccgcctatggccttgcggccgtttga

SEQ ID NO: 202 - protein, 117 aa, Artificial sequence
  Synthetic polypeptide
  VARIANT (2)..(3): Xaa is any amino acid
  VARIANT (5)..(7): Xaa is any amino acid
  VARIANT (8)..(8): Xaa is Tyr or Phe
  VARIANT (9)..(27): Xaa is any amino acid
  VARIANT (30)..(31): Xaa is any amino acid
  VARIANT (33)..(35): Xaa is any amino acid
  VARIANT (37)..(38): Xaa is any amino acid
  VARIANT (40)..(78): Xaa is any amino acid
  VARIANT (80)..(83): Xaa is any amino acid
  VARIANT (85)..(86): Xaa is any amino acid
  VARIANT (88)..(90): Xaa is any amino acid
  VARIANT (92)..(112): Xaa is any amino acid
  VARIANT (113)..(113): Xaa is Asp or Glu
  VARIANT (115)..(116): Xaa is any amino acid
EXXAXXXXXXXXXXXXXXXXXXXXXXXMEXXHXXXFXXQXXXXXXXXXXXXXXXXXXXXXXXXXXXXXXXXXXXXXXXEXXXXAXXYXXXVXXXXXXXXXXXXXXXXXXXXXXEXXH

SEQ ID NO: 203 - protein, 19 aa, Artificial sequence
  Synthetic polypeptide
  VARIANT (2)..(3): Xaa is any amino acid
  VARIANT (6)..(6): Xaa is any amino acid
  VARIANT (8)..(11): Xaa is any amino acid
  VARIANT (13)..(14): Xaa is any amino acid
  VARIANT (17)..(18): Xaa is any amino acid
YXXAYXRXXXXVXXGEXXA

SEQ ID NO: 204 - protein, 15 aa, Artificial sequence
  Synthetic polypeptide
  VARIANT (2)..(3): Xaa is any amino acid
  VARIANT (6)..(7): Xaa is any amino acid
  VARIANT (9)..(11): Xaa is any amino acid
  VARIANT (13)..(14): Xaa is any amino acid
LXXMEXXHXXXFXXC

SEQ ID NO: 205 - protein, 17 aa, Artificial sequence
  Synthetic polypeptide
  VARIANT (2)..(4): Xaa is any amino acid
  VARIANT (6)..(9): Xaa is any amino acid
  VARIANT (11)..(11): Xaa is any amino acid
  VARIANT (14)..(15): Xaa is any amino acid
CXXXQXXXXEXFAXXAY

SEQ ID NO: 206 - protein, 19 aa, Artificial sequence
  Synthetic polypeptide
  VARIANT (2)..(3): Xaa is any amino acid
  VARIANT (5)..(7): Xaa is any amino acid
  VARIANT (9)..(10): Xaa is any amino acid
  VARIANT (12)..(17): Xaa is any amino acid
TXXVXXXEXXHXXXXXXWL

SEQ ID NO: 207 - protein, 23 aa, Artificial sequence
  Synthetic polypeptide
  VARIANT (2)..(2): Xaa is Lys, Arg, or Gln
  VARIANT (3)..(3): Xaa is any amino acid
  VARIANT (6)..(6): Xaa is Ser or Arg
  VARIANT (8)..(8): Xaa is Ile or Val
  VARIANT (9)..(9): Xaa is Asp or Asn
  VARIANT (10)..(10): Xaa is Gly or Ala
  VARIANT (11)..(11): Xaa is Val or Ile
  VARIANT (13)..(13): Xaa is Ile or Leu
  VARIANT (14)..(14): Xaa is any amino acid
  VARIANT (17)..(18): Xaa is any amino acid
  VARIANT (20)..(21): Xaa is any amino acid
  VARIANT (22)..(22): Xaa is Asn or His
  VARIANT (23)..(23): Xaa is Tyr or Phe
YXXAYXRXXXXVXXGEXXAXXXX

SEQ ID NO: 208 - protein, 21 aa, Artificial sequence
  Synthetic polypeptide
  VARIANT (2)..(2): Xaa is Ala, Ser, or Gly
  VARIANT (3)..(3): Xaa is any amino acid
  VARIANT (6)..(6): Xaa is any amino acid
  VARIANT (7)..(7): Xaa is Arg, Asp, or Lys
  VARIANT (9)..(10): Xaa is any amino acid
  VARIANT (11)..(11): Xaa is Ala, Ser, or Gly
  VARIANT (13)..(13): Xaa is any amino acid
  VARIANT (14)..(14): Xaa is Ala, Ser, or Gly
  VARIANT (16)..(16): Xaa is Ala or Gly
  VARIANT (17)..(17): Xaa is any amino acid
  VARIANT (20)..(20): Xaa is any amino acid
  VARIANT (21)..(21): Xaa is Val or Ile
LXXMEXXHXXXFXXCXXNLXX

SEQ ID NO: 209 - protein, 21 aa, Artificial sequence
  Synthetic polypeptide
  VARIANT (2)..(2): Xaa is Leu, Met, or Phe
  VARIANT (3)..(3): Xaa is Val or Leu
  VARIANT (4)..(4): Xaa is Ile or Val
  VARIANT (6)..(6): Xaa is any amino acid
  VARIANT (7)..(7): Xaa is Leu or Ile
  VARIANT (8)..(8): Xaa is Ile, Leu, or Met
  VARIANT (9)..(9): Xaa is Ile or Val
  VARIANT (11)..(11): Xaa is any amino acid
  VARIANT (14)..(14): Xaa is Ile or Val
  VARIANT (15)..(15): Xaa is Ala or Ser
  VARIANT (18)..(18): Xaa is Asn, His, or Arg
  VARIANT (19)..(19): Xaa is any amino acid
  VARIANT (21)..(21): Xaa is Ile or Leu
CXXXQXXXXEXFAXXAYXXYX

SEQ ID NO: 210 - protein, 26 aa, Artificial sequence
  Synthetic polypeptide
  VARIANT (2)..(2): Xaa is any amino acid
  VARIANT (3)..(3): Xaa is Phe or Tyr
  VARIANT (5)..(5): Xaa is Arg or Lys
  VARIANT (6)..(6): Xaa is any amino acid
  VARIANT (7)..(7): Xaa is Ile or Val
  VARIANT (9)..(10): Xaa is any amino acid
  VARIANT (12)..(12): Xaa is Val or Met
  VARIANT (13)..(13): Xaa is any amino acid
  VARIANT (14)..(14): Xaa is Asp or Glu
  VARIANT (16)..(16): Xaa is Tyr or Ser
  VARIANT (17)..(17): Xaa is any amino acid
  VARIANT (19)..(19): Xaa is Leu or Arg
  VARIANT (20)..(20): Xaa is Asn or Asp
  VARIANT (21)..(21): Xaa is Tyr or Phe
  VARIANT (22)..(22): Xaa is Ala or Gly
  VARIANT (23)..(23): Xaa is Glu or Gln
  VARIANT (24)..(24): Xaa is any amino acid
DXXAXXXTXXVXXXEXXHXXXXXXWL

SEQ ID NO: 211 - DNA, 29 bp, Artificial sequence
  Primer
catatgtcgatcaacgatcagcgactgac

SEQ ID NO: 212 - DNA, 26 bp, Artificial sequence
  Primer
cctaggtcacagcagcccgagcagtc

SEQ ID NO: 213 - DNA, 20 bp, Artificial sequence
  Primer
catatgacgatcgaaacgcg

SEQ ID NO: 214 - DNA, 26 bp, Artificial sequence
  Primer
cctaggttacagcaatccgagcatct

SEQ ID NO: 215 - DNA, 21 bp, Artificial sequence
  Primer
catatgaccagcgatgttcac

SEQ ID NO: 216 - DNA, 27 bp, Artificial sequence
  Primer
cctaggtcagatcagaccgaactcacg

SEQ ID NO: 217 - DNA, 36 bp, Artificial sequence
  Primer
gaccacgtgatcggcccccatagctttgagctcatc

SEQ ID NO: 218 - DNA, 36 bp, Artificial sequence
  Primer
gatgagctcaaagctatgggggccgatcacgtggtc

SEQ ID NO: 219 - DNA, 42 bp, Artificial sequence
  Primer
aataccatggcaacaactaatgtgattcatgcttatgctgca

SEQ ID NO: 220 - DNA, 42 bp, Artificial sequence
  Primer
ataaaagcttttaaaaatcggctttaagtacaatccgataac

SEQ ID NO: 221 - DNA, 38 bp, Artificial sequence
  Primer
aatcctggcatcgatgataaaaagctatgccgcaaaag

SEQ ID NO: 222 - DNA, 38 bp, Artificial sequence
  Primer
ataaaagctttcaaaaatcggctttcaacaccacgcgg

SEQ ID NO: 223 - DNA, 71 bp, Artificial sequence
  Primer
taaccggcgtctgacgactgacttaacgctcaggctttattgtccactttgtgtaggctggagctgcttcg

SEQ ID NO: 224 - DNA, 75 bp, Artificial sequence
  Primer
catttggggttgcgatgacgacgaacacgcattttagaggtgaagaattgcatatgaatatcctcctttagttcc

SEQ ID NO: 225 - DNA, 20 bp, Artificial sequence
  Primer
cgtccgtggtaatcatttgg

SEQ ID NO: 226 - DNA, 18 bp, Artificial sequence
  Primer
tcgcaaccttttcgttgg

SEQ ID NO: 227 - DNA, 70 bp, Artificial sequence
  Primer
gcgcctcagatcagcgctgcgaatgattttcaaaaatcggctttcaacactgtaggctggagctgcttcg

SEQ ID NO: 228 - DNA, 70 bp, Artificial sequence
  Primer
ctgccatgctctacacttcccaaacaacaccagagaaggaccaaaaaatgattccggggatccgtcgacc

SEQ ID NO: 229 - DNA, 22 bp, Artificial sequence
  Primer
gtgctggcgatacgacaaaaca

SEQ ID NO: 230 - DNA, 23 bp, Artificial sequence
  Primer
ccccgccctgccatgctctacac

SEQ ID NO: 231 - DNA, 50 bp, Artificial sequence
  Primer
catatcaggcgttgccaaatacacatagctaatcaggagtaaacacaatg

SEQ ID NO: 232 - DNA, 50 bp, Artificial sequence
  Primer
aatcgcacactaacagactgaaaaaattaataaataccctgtggtttaac

SEQ ID NO: 233 - DNA, 5903 bp, Artificial sequence
  Expression vector OP-80
cactataccaattgagatgggctagtcaatgataattactagtccttttcctttgagttgtgggtatctgtaaattctgctagacctttgctggaaaacttgtaaattctgctagaccctctgtaaattccgctagacctttgtgtgttttttttgtttatattcaagtggttataatttatagaataaagaaagaataaaaaaagataaaaagaatagatcccagccctgtgtataactcactactttagtcagttccgcagtattacaaaaggatgtcgcaaacgctgtttgctcctctacaaaacagaccttaaaaccctaaaggcgtcggcatccgcttacagacaagctgtgaccgtctccgggagctgcatgtgtcagaggttttcaccgtcatcaccgaaacgcgcgaggcagcagatcaattcgcgcgcgaaggcgaagcggcatgcatttacgttgacaccatcgaatggtgcaaaacctttcgcggtatggcatgatagcgcccggaagagagtcaattcagggtggtgaatgtgaaaccagtaacgttatacgatgtcgcagagtatgccggtgtctcttatcagaccgtttcccgcgtggtgaaccaggccagccacgtttctgcgaaaacgcgggaaaaagtggaagcggcgatggcggagctgaattacattcccaaccgcgtggcacaacaactggcgggcaaacagtcgttgctgattggcgttgccacctccagtctggccctgcacgcgccgtcgcaaattgtcgcggcgattaaatctcgcgccgatcaactgggtgccagcgtggtggtgtcgatggtagaacgaagcggcgtcgaagcctgtaaagcggcggtgcacaatcttctcgcgcaacgcgtcagtgggctgatcattaactatccgctggatgaccaggatgccattgctgtggaagctgcctgcactaatgttccggcgttatttcttgatgtctctgaccagacacccatcaacagtattattttctcccatgaagacggtacgcgactgggcgtggagcatctggtcgcattgggtcaccagcaaatcgcgctgttagcgggcccattaagttctgtctcggcgcgtctgcgtctggctggctggcataaatatctcactcgcaatcaaattcagccgatagcggaacgggaaggcgactggagtgccatgtccggttttcaacaaaccatgcaaatgctgaatgagggcatcgttcccactgcgatgctggttgccaacgatcagatggcgctgggcgcaatgcgcgccattaccgagtccgggctgcgcgttggtgcggatatctcggtagtgggatacgacgataccgaagacagctcatgttatatcccgccgttaaccaccatcaaacaggattttcgcctgctggggcaaaccagcgtggaccgcttgctgcaactctctcagggccaggcggtgaagggcaatcagctgttgcccgtctcactggtgaaaagaaaaaccaccctggcgcccaatacgcaaaccgcctctccccgcgcgttggccgattcattaatgcagctggcacgacaggtttcccgactggaaagcgggcagtgagcgcaacgcaattaatgtaagttagcgcgaattgatctggtttgacagcttatcatcgactgcacggtgcaccaatgcttctggcgtcaggcagccatcggaagctgtggtatggctgtgcaggtcgtaaatcactgcataattcgtgtcgctcaaggcgcactcccgttctggataatgttttttgcgccgacatcataacggttctggcaaatattctgaaatgagctgttgacaattaatcatccggctcgtataatgtgtggaattgtgagcggataacaatttcacacaggaaacagcgccgctgagaaaaagcgaagcggcactgctctttaacaatttatcagacaatctgtgtgggcactcgaccggaattatcgattaactttattattaaaaattaaagaggtatatattaatgtatcgattaaataaggaggaataaaccatggatccgagctcgagatctgcagctggtaccatatgggaattcgaagcttgggcccgaacaaaaactcatctcagaagaggatctgaatagcgccgtcgaccatcatcatcatcatcattgagtttaaacggtctccagcttggctgttttggcggatgagagaagattttcagcctgatacagattaaatcagaacgcagaagcggtctgataaaacagaatttgcctggcggcagtagcgcggtggtcccacctgaccccatgccgaactcagaagtgaaacgccgtagcgccgatggtagtgtggggtctccccatgcgagagtagggaactgccaggcatcaaataaaacgaaaggctcagtcgaaagactgggcctttcgttttatctgttgtttgtcggtgaacgctctcctgacgcctgatgcggtattttctccttacgcatctgtgcggtatttcacaccgcatatggtgcactctcagtacaatctgctctgatgccgcatagttaagccagccccgacacccgccaacacccgctgacgagcttagtaaagccctcgctagattttaatgcggatgttgcgattacttcgccaactattgcgataacaagaaaaagccagcctttcatgatatatctcccaatttgtgtagggcttattatgcacgcttaaaaataataaaagcagacttgacctgatagtttggctgtgagcaattatgtgcttagtgcatctaacgcttgagttaagccgcgccgcgaagcggcgtcggcttgaacgaattgttagacattatttgccgactaccttggtgatctcgcctttcacgtagtggacaaattcttccaactgatctgcgcgcgaggccaagcgatcttcttcttgtccaagataagcctgtctagcttcaagtatgacgggctgatactgggccggcaggcgctccattgcccagtcggcagcgacatccttcggcgcgattttgccggttactgcgctgtaccaaatgcgggacaacgtaagcactacatttcgctcatcgccagcccagtcgggcggcgagttccatagcgttaaggtttcatttagcgcctcaaatagatcctgttcaggaaccggatcaaagagttcctccgccgctggacctaccaaggcaacgctatgttctcttgcttttgtcagcaagatagccagatcaatgtcgatcgtggctggctcgaagatacctgcaagaatgtcattgcgctgccattctccaaattgcagttcgcgcttagctggataacgccacggaatgatgtcgtcgtgcacaacaatggtgacttctacagcgcggagaatctcgctctctccaggggaagccgaagtttccaaaaggtcgttgatcaaagctcgccgcgttgtttcatcaagccttacggtcaccgtaaccagcaaatcaatatcactgtgtggcttcaggccgccatccactgcggagccgtacaaatgtacggccagcaacgtcggttcgagatggcgctcgatgacgccaactacctctgatagttgagtcgatacttcggcgatcaccgcttccctcatgatgtttaactttgttttagggcgactgccctgctgcgtaacatcgttgctgctccataacatcaaacatcgacccacggcgtaacgcgcttgctgcttggatgcccgaggcatagactgtaccccaaaaaaacagtcataacaagccatgaaaaccgccactgcgccgttaccaccgctgcgttcggtcaaggttctggaccagttgcgtgagcgcatacgctacttgcattacagcttacgaaccgaacaggcttatgtccactgggttcgtgccttcatccgtttccacggtgtgcgtcacccggcaaccttgggcagcagcgaagtcgaggcatttctgtcctggctggcgaacgagcgcaaggtttcggtctccacgcatcgtcaggcattggcggccttgctgttcttctacggcaaggtgctgtgcacggatctgccctggcttcaggagatcggaagacctcggccgtcgcggcgcttgccggtggtgctgaccccggatgaagtggttcgcatcctcggttttctggaaggcgagcatcgtttgttcgcccagcttctgtatggaacgggcatgcggatcagtgagggtttgcaactgcgggtcaaggatctggatttcgatcacggcacgatcatcgtgcgggagggcaagggctccaaggatcgggccttgatgttacccgagagcttggcacccagcctgcgcgagcaggggaattaattcccacgggttttgctgcccgcaaacgggctgttctggtgttgctagtttgttatcagaatcgcagatccggcttcagccggtttgccggctgaaagcgctatttcttccagaattgccatgattttttccccacgggaggcgtcactggctcccgtgttgtcggcagctttgattcgataagcagcatcgcctgtttcaggctgtctatgtgtgactgttgagctgtaacaagttgtctcaggtgttcaatttcatgttctagttgctttgttttactggtttcacctgttctattaggtgttacatgctgttcatctgttacattgtcgatctgttcatggtgaacagctttgaatgcaccaaaaactcgtaaaagctctgatgtatctatcttttttacaccgttttcatctgtgcatatggacagttttccctttgatatgtaacggtgaacagttgttctacttttgtttgttagtcttgatgcttcactgatagatacaagagccataagaacctcagatccttccgtatttagccagtatgttctctagtgtggttcgttgtttttgcgtgagccatgagaacgaaccattgagatcatacttactttgcatgtcactcaaaaattttgcctcaaaactggtgagctgaatttttgcagttaaagcatcgtgtagtgtttttcttagtccgttatgtaggtaggaatctgatgtaatggttgttggtattttgtcaccattcatttttatctggttgttctcaagttcggttacgagatccatttgtctatctagttcaacttggaaaatcaacgtatcagtcgggcggcctcgcttatcaaccaccaatttcatattgctgtaagtgtttaaatctttacttattggtttcaaaacccattggttaagccttttaaactcatggtagttattttcaagcattaacatgaacttaaattcatcaaggctaatctctatatttgccttgtgagttttcttttgtgttagttcttttaataaccactcataaatcctcatagagtatttgttttcaaaagacttaacatgttccagattatattttatgaatttttttaactggaaaagataaggcaatatctcttcactaaaaactaattctaatttttcgcttgagaacttggcatagtttgtccactggaaaatctcaaagcctttaaccaaaggattcctgatttccacagttctcgtcatcagctctctggttgctttagctaatacaccataagcattttccctactgatgttcatcatctgagcgtattggttataagtgaacgataccgtccgttctttccttgtagggttttcaatcgtggggttgagtagtgccacacagcataaaattagcttggtttcatgctccgttaagtcatagcgactaatcgctagttcatttgctttgaaaacaactaattcagacatacatctcaattggtctaggtgattttaat

SEQ ID NO: 234 - DNA, 48 bp, Artificial sequence
  Primer
taaggaggaataaaccatggctgttactaatgtcgctgaacttaacgc

SEQ ID NO: 235 - DNA, 55 bp, Artificial sequence
  Primer
cgggcccaagcttcgaattttaagcggattttttcgcttttttctcagctttagc

SEQ ID NO: 236 - DNA, 47 bp, Artificial sequence
  Primer
taaggaggaataaaccatgaaggctgcagttgttacgaaggatcatc

SEQ ID NO: 237 - DNA, 48 bp, Artificial sequence
  Primer
cgggcccaagcttcgaattttagtgacggaaatcaatcaccatgcggc

SEQ ID NO: 238 - DNA, 44 bp, Artificial sequence
  Primer
taaggaggaataaaccatggagaggattgtcgttactctcgggg

SEQ ID NO: 239 - DNA, 46 bp, Artificial sequence
  Primer
cgggcccaagcttcgaattttacgctgattgacaatcggcaatggc

SEQ ID NO: 240 - DNA, 50 bp, Artificial sequence
  Primer
taaggaggaataaaccatggctaatccaaccgttattaagctacaggatg

SEQ ID NO: 241 - DNA, 45 bp, Artificial sequence
  Primer
cgggcccaagcttcgaattttagccgccgaactggtcaggatcgg

SEQ ID NO: 242 - DNA, 45 bp, Artificial sequence
  Primer
taaggaggaataaaccatggctatccctgcatttggtttaggtac

SEQ ID NO: 243 - DNA, 46 bp, Artificial sequence
  Primer
cgggcccaagcttcgaattttaatcccattcaggagccagaccttc

SEQ ID NO: 244 - DNA, 48 bp, Artificial sequence
  Primer
taaggaggaataaaccatggatttcagcggtaaaaatgtctgggtaac

SEQ ID NO: 245 - DNA, 40 bp, Artificial sequence
  Primer
cgggcccaagcttcgaattttatgcccccagcgttgagcc

SEQ ID NO: 246 - DNA, 43 bp, Artificial sequence
  Primer
taaggaggaataaaccatgcaaaatgaattgcagaccgcgctc

SEQ ID NO: 247 - DNA, 41 bp, Artificial sequence
  Primer
cgggcccaagcttcgaattttattgcgccgctgcgtacagg

SEQ ID NO: 248 - DNA, 44 bp, Artificial sequence
  Primer
taaggaggaataaaccatgggttttctttccggtaagcgcattc

SEQ ID NO: 249 - DNA, 53 bp, Artificial sequence
  Primer
cgggcccaagcttcgaattttatttcagttcgagttcgttcattgcagcaatg

SEQ ID NO: 250 - DNA, 51 bp, Artificial sequence
  Primer
taaggaggaataaaccatgggtaaaacccagcccttgccaatattaattac

SEQ ID NO: 251 - DNA, 43 bp, Artificial sequence
  Primer
cgggcccaagcttcgaattttaacgcagatgacgaccgccatc

SEQ ID NO: 252 - DNA, 44 bp, Artificial sequence
  Primer
taaggaggaataaaccatgaaatcacgtgctgccgttgcatttg

SEQ ID NO: 253 - DNA, 52 bp, Artificial sequence
  Primer
cgggcccaagcttcgaatttcagtaacgaattacggttcgaatggatttgcc

SEQ ID NO: 254 - DNA, 50 bp, Artificial sequence
  Primer
taaggaggaataaaccatgatggctaacagaatgattctgaacgaaacgg

SEQ ID NO: 255 - DNA, 53 bp, Artificial sequence
  Primer
cgggcccaagcttcgaattttaccaggcggtatggtaaagctctacaatatcc

SEQ ID NO: 256 - DNA, 52 bp, Artificial sequence
  Primer
taaggaggaataaaccatgaaatcagtggtgaatgatactgatggtatcgtg

SEQ ID NO: 257 - DNA, 44 bp, Artificial sequence
  Primer
cgggcccaagcttcgaatttcagggaatgagcaacactttgccc

SEQ ID NO: 258 - DNA, 49 bp, Artificial sequence
  Primer
taaggaggaataaaccatggaccgcattattcaatcaccgggtaaatac

SEQ ID NO: 259 - DNA, 48 bp, Artificial sequence
  Primer
cgggcccaagcttcgaattttattcccactcttgcaggaaacgctgac

SEQ ID NO: 260 - DNA, 47 bp, Artificial sequence
  Primer
taaggaggaataaaccgtgtttaattctgacaacctgagactcgacg

SEQ ID NO: 261 - DNA, 46 bp, Artificial sequence
  Primer
cgggcccaagcttcgaattttaattgagctcctgtaccccaccacc

SEQ ID NO: 262 - DNA, 44 bp, Artificial sequence
  Primer
taaggaggaataaaccatgcaagtgaaaacacagtcctgcgttg

SEQ ID NO: 263 - DNA, 49 bp, Artificial sequence
  Primer
cgggcccaagcttcgaattttagaaaacaagctggacttttgctgcctg

SEQ ID NO: 264 - DNA, 60 bp, Artificial sequence
  Primer
taaggaggaataaaccatgaacgatctattttcactggcaggaaaaaatatcttgattac

SEQ ID NO: 265 - DNA, 46 bp, Artificial sequence
  Primer
cgggcccaagcttcgaattttaaacagccactaacatgccgccatc

SEQ ID NO: 266 - DNA, 55 bp, Artificial sequence
  Primer
taaggaggaataaaccatgattttaagtgcattttctctcgaaggtaaagttgcg

SEQ ID NO: 267 - DNA, 38 bp, Artificial sequence
  Primer
cgggcccaagcttcgaattttaacgcgccagccaaccg

SEQ ID NO: 268 - DNA, 47 bp, Artificial sequence
  Primer
taaggaggaataaaccatggcaacacgaattgaatttcacaagcacg

SEQ ID NO: 269 - DNA, 46 bp, Artificial sequence
  Primer
cgggcccaagcttcgaattttatggaatcagcaggctggaaccttg

SEQ ID NO: 270 - DNA, 54 bp, Artificial sequence
  Primer
taaggaggaataaaccatgaaaagcatattaattgaaaaaccgaatcaactggc

SEQ ID NO: 271 - DNA, 60 bp, Artificial sequence
  Primer
cgggcccaagcttcgaatttattcagaaaaagtgagtaagactttgcagcaatgtttttg

SEQ ID NO: 272 - DNA, 42 bp, Artificial sequence
  Primer
taaggaggaataaaccatgaatcaggttgccgttgtcatcgg

SEQ ID NO: 273 - DNA, 41 bp, Artificial sequence
  Primer
cgggcccaagcttcgaatttcagaacatcacctgaccgccg

SEQ ID NO: 274 - DNA, 47 bp, Artificial sequence
  Primer
taaggaggaataaaccatgaaagcgttatccaaactgaaagcggaag

SEQ ID NO: 275 - DNA, 50 bp, Artificial sequence
  Primer
cgggcccaagcttcgaattttaatcccagctcagaataactttcccggac

SEQ ID NO: 276 - DNA, 41 bp, Artificial sequence
  Primer
taaggaggaataaaccatgggtaaactcacgggcaagacag

SEQ ID NO: 277 - DNA, 44 bp, Artificial sequence
  Primer
cgggcccaagcttcgaatttcagataccgacgctaaccgtctcc

SEQ ID NO: 278 - DNA, 47 bp, Artificial sequence
  Primer
taaggaggaataaaccatgaagatcaaagctgttggtgcatattccg

SEQ ID NO: 279 - DNA, 55 bp, Artificial sequence
  Primer
cgggcccaagcttcgaatttcagtctgttagtgtgcgattatcgataacaaaacg

SEQ ID NO: 280 - DNA, 46 bp, Artificial sequence
  Primer
taaggaggaataaaccatgcaatacaaccccttaggaaaaaccgac

SEQ ID NO: 281 - DNA, 55 bp, Artificial sequence
  Primer
cgggcccaagcttcgaattttatttaaatcctacgacaggatgcggtttatacgg

SEQ ID NO: 282 - DNA, 47 bp, Artificial sequence
  Primer
taaggaggaataaaccatgactcataaagcaacggagatcctgacag

SEQ ID NO: 283 - DNA, 47 bp, Artificial sequence
  Primer
cgggcccaagcttcgaatttcacccctgcaatattttgtccatcacg

SEQ ID NO: 284 - DNA, 40 bp, Artificial sequence
  Primer
taaggaggaataaaccatgcctcacaatcctatccgcgtg

SEQ ID NO: 285 - DNA, 52 bp, Artificial sequence
  Primer
cgggcccaagcttcgaatttcaggctttaaacgattccacttttttgaacgc

SEQ ID NO: 286 - DNA, 44 bp, Artificial sequence
  Primer
taaggaggaataaaccatgaaagcattgacttatcacggcccac

SEQ ID NO: 287 - DNA, 42 bp, Artificial sequence
  Primer
cgggcccaagcttcgaatttcatattgttccccccggcatcg

SEQ ID NO: 288 - DNA, 53 bp, Artificial sequence
  Primer
taaggaggaataaaccatgcattaccagccaaaacaagatttactcaatgatc

SEQ ID NO: 289 - DNA, 46 bp, Artificial sequence
  Primer
cgggcccaagcttcgaatttcattgggaaattcctggtttacggcc

SEQ ID NO: 290 - DNA, 44 bp, Artificial sequence
  Primer
taaggaggaataaaccatgaaaaagttagtagccacagcaccgc

SEQ ID NO: 291 - DNA, 52 bp, Artificial sequence
  Primer
cgggcccaagcttcgaattttaaaacgtaacgcccattttgatgctctgttc

SEQ ID NO: 292 - DNA, 51 bp, Artificial sequence
  Primer
taaggaggaataaaccatgagcagcaatacatttactctcggtacaaaatc

SEQ ID NO: 293 - DNA, 53 bp, Artificial sequence
  Primer
cgggcccaagcttcgaattttattctcgcgaaataccatccaacgtagacaac

SEQ ID NO: 294 - DNA, 47 bp, Artificial sequence
  Primer
taaggaggaataaaccatgatcgttttagtaactggagcaacggcag

SEQ ID NO: 295 - DNA, 44 bp, Artificial sequence
  Primer
cgggcccaagcttcgaattttactgacggtggacattcagtccg

SEQ ID NO: 296 - DNA, 43 bp, Artificial sequence
  Primer
taaggaggaataaaccatggttcagcgtattactattgcgccg

SEQ ID NO: 297 - DNA, 42 bp, Artificial sequence
  Primer
cgggcccaagcttcgaattttacggtacgtcgtaccccagtg

SEQ ID NO: 298 - DNA, 53 bp, Artificial sequence
  Primer
taaggaggaataaaccatgaaaaagatacctttaggcacaacggatattacgc

SEQ ID NO: 299 - DNA, 40 bp, Artificial sequence
  Primer
cgggcccaagcttcgaattttaacgctccagggcctctgc

SEQ ID NO: 300 - DNA, 49 bp, Artificial sequence
  Primer
taaggaggaataaaccatgaaaaattcaaaagcaatattgcaggtgccg

SEQ ID NO: 301 - DNA, 60 bp, Artificial sequence
  Primer
cgggcccaagcttcgaattaatcgctaattttaataacgcctttaataatgtcgcgtttg

SEQ ID NO: 302 - DNA, 40 bp, Artificial sequence
  Primer
taaggaggaataaaccatgaaagcactggctcggtttggc

SEQ ID NO: 303 - DNA, 59 bp, Artificial sequence
  Primer
cgggcccaagcttcgaattttattcatcaaagtcgtaagtcatgatcactttgattgcg

SEQ ID NO: 304 - DNA, 54 bp, Artificial sequence
  Primer
taaggaggaataaaccatgcaacaaaaaatgattcaatttagtggcgatgtctc

SEQ ID NO: 305 - DNA, 46 bp, Artificial sequence
  Primer
cgggcccaagcttcgaatttcacaccatatccagcgcagtttttcc

SEQ ID NO: 306 - DNA, 49 bp, Artificial sequence
  Primer
taaggaggaataaaccatgtcaatcgaatctctcaatgcgttctcaatg

SEQ ID NO: 307 - DNA, 47 bp, Artificial sequence
  Primer
cgggcccaagcttcgaattttagcgcactaaataaccgccatcaacc

SEQ ID NO: 308 - DNA, 42 bp, Artificial sequence
  Primer
taaggaggaataaaccatggctatagcacttgtgactggtgg

SEQ ID NO: 309 - DNA, 41 bp, Artificial sequence
  Primer
cgggcccaagcttcgaattttatttcccgcccgccaaatcg

SEQ ID NO: 310 - DNA, 50 bp, Artificial sequence
  Primer
taaggaggaataaaccatgaaaaccaaagttgctgctatttatggcaagc

SEQ ID NO: 311 - DNA, 36 bp, Artificial sequence
  Primer
cgggcccaagcttcgaatttcattgcgcggcctccc

SEQ ID NO: 312 - DNA, 46 bp, Artificial sequence
  Primer
taaggaggaataaaccatgtctcatttaaaagacccgaccacgcag

SEQ ID NO: 313 - DNA, 41 bp, Artificial sequence
  Primer
cgggcccaagcttcgaattttaacctaaatgctcgccgccg

SEQ ID NO: 314 - DNA, 41 bp, Artificial sequence
  Primer
taaggaggaataaaccatggtctggttagcgaatcccgaac

SEQ ID NO: 315 - DNA, 44 bp, Artificial sequence
  Primer
cgggcccaagcttcgaatttcatttatcggaagacgcctgccac

SEQ ID NO: 316 - DNA, 44 bp, Artificial sequence
  Primer
taaggaggaataaaccatgcaggcgttacttttagaacagcagg

SEQ ID NO: 317 - DNA, 45 bp, Artificial sequence
  Primer
cgggcccaagcttcgaattttagttaaccttcaccagcgtgcgac

SEQ ID NO: 318 - DNA, 47 bp, Artificial sequence
  Primer
taaggaggaataaaccatggcagcttcaacgttctttattccttctg

SEQ ID NO: 319 - DNA, 44 bp, Artificial sequence
  Primer
cgggcccaagcttcgaattttacatcgctgcgcgataaatcgcc

SEQ ID NO: 320 - DNA, 50 bp, Artificial sequence
  Primer
taaggaggaataaaccatgtcgatgataaaaagctatgccgcaaaagaag

SEQ ID NO: 321 - DNA, 45 bp, Artificial sequence
  Primer
cgggcccaagcttcgaatttcaaaaatcggctttcaacaccacgc

SEQ ID NO: 322 - DNA, 44 bp, Artificial sequence
  Primer
taaggaggaataaaccatgggcgcttttacaggtaagacagttc

SEQ ID NO: 323 - DNA, 40 bp, Artificial sequence
  Primer
cgggcccaagcttcgaattttatgcgccaaacgcgccatc

SEQ ID NO: 324 - DNA, 50 bp, Artificial sequence
  Primer
taaggaggaataaaccatgtctacgatgaatgttttaatttgccagcagc

SEQ ID NO: 325 - DNA, 60 bp, Artificial sequence
  Primer
cgggcccaagcttcgaatttcagaaagtaattacgcctttaattaactcacgattgttaa

SEQ ID NO: 326 - DNA, 41 bp, Artificial sequence
  Primer
taaggaggaataaaccatggggcaacaaaagcagcgtaatc

SEQ ID NO: 327 - DNA, 40 bp, Artificial sequence
  Primer
cgggcccaagcttcgaattttaatcatcacccgccacgcg

SEQ ID NO: 328 - DNA, 42 bp, Artificial sequence
  Primer
taaggaggaataaaccatggcacaggttgcgattattaccgc

SEQ ID NO: 329 - DNA, 47 bp, Artificial sequence
  Primer
cgggcccaagcttcgaattctattctgggttgaactgtggattcgcc

SEQ ID NO: 330 - DNA, 46 bp, Artificial sequence
  Primer
taaggaggaataaaccatgcaatatcaccgtataccccacagttcg

SEQ ID NO: 331 - DNA, 52 bp, Artificial sequence
  Primer
cgggcccaagcttcgaattttatggtgccggataagtataaacctgatgcac

SEQ ID NO: 332 - DNA, 51 bp, Artificial sequence
  Primer
taaggaggaataaaccatgagcgatctgcataacgagtccatttttattac

SEQ ID NO: 333 - DNA, 43 bp, Artificial sequence
  Primer
cgggcccaagcttcgaattttaaagatccagcccagccgctac

SEQ ID NO: 334 - DNA, 50 bp, Artificial sequence
  Primer
taaggaggaataaaccatgaattttgaaggaaaaatcgcactggtaaccg

SEQ ID NO: 335 - DNA, 41 bp, Artificial sequence
  Primer
cgggcccaagcttcgaatttcagaccatgtacatcccgccg

SEQ ID NO: 336 - DNA, 47 bp, Artificial sequence
  Primer
taaggaggaataaaccatgaaaacgatgctggcagcttatttaccag

SEQ ID NO: 337 - DNA, 51 bp, Artificial sequence
  Primer
cgggcccaagcttcgaattttaatccgggaagttaatcacaactttcccgc

SEQ ID NO: 338 - DNA, 46 bp, Artificial sequence
  Primer
taaggaggaataaaccatgaacaactttaatctgcacaccccaacc

SEQ ID NO: 339 - DNA, 43 bp, Artificial sequence
  Primer
cgggcccaagcttcgaattttagcgggcggcttcgtatatacg

It is claimed:

1. A microorganism engineered to produce a fatty acid derivative, said microorganism comprising, polynucleotide sequences encoding:
(a) a thioesterase (EC 3.1.1.5);
(b) a fatty aldehyde biosynthetic polypeptide; and
(c) a fatty alcohol biosynthetic polypeptide,
wherein expression of said polypeptides is modified relative to the corresponding wild type polypeptide, and said microorganism produces an increased titer of the fatty acid derivative relative to a wild type microorganism.

2. The engineered microorganism according to claim 1, wherein said fatty aldehyde biosynthetic polypeptide has at least 90% sequence identity to the amino acid sequence presented as SEQ ID NO: 41, 43, 45, 47, 49, 51, 53, 55, 57, 59, 61, 63, 65, 69, 71, 73, 75, 77, 79, 81, 83, 85, 87, 89, 91, 93, 97, 99, 101, 103, 105, 107, 109, 111, 113, 115, 117, 119, 121, 123, 125, or 127.

3. The engineered microorganism according to claim 1, wherein said fatty aldehyde biosynthetic polypeptide comprises an amino acid sequence motif with a sequence presented as (1) SEQ ID NO:129, SEQ ID NO:130, SEQ ID NO:131, and SEQ ID NO:132; (2) SEQ ID NO:133; SEQ ID NO:134; SEQ ID NO:135; SEQ ID NO: 136; or (3) SEQ ID NO:129, SEQ ID NO:131, SEQ ID NO:132 or SEQ ID NO:133.

4. The engineered microorganism according to claim 1, wherein said fatty aldehyde biosynthetic polypeptide is encoded by a polynucleotide having at least 90% sequence identity to the nucleotide sequence presented as SEQ ID NO: 42, 44, 46, 48, 50, 52, 54, 56, 58, 60, 62, 64, 66, 68, 70, 72, 74, 76, 78, 80, 82, 84, 86, 88, 90, 92, 94, 96, 98, 100, 102, 104, 106, 108, 110, 112, 114, 116, 118, 120, 122, 124, 126, or 128.

5. A microorganism engineered to produce a fatty acid derivative, said microorganism comprising, polynucleotide sequences encoding:
(a) an acyl-ACP reductase polypeptide; and
(b) a fatty alcohol biosynthetic polypeptide,
wherein expression of said polypeptides is modified relative to the corresponding wild type polypeptide and said microorganism produces an increased titer of the fatty acid derivative relative to a wild type microorganism.

6. The engineered microorganism according to claim 5, wherein the acyl-ACP reductase polypeptide comprises an amino acid sequence having at least 90% sequence identity to a sequence presented as SEQ ID NO: 137, 139, 141, 143, 145, 147, 149, 151, or 153.

7. The engineered microorganism according to claim 5, wherein the acyl-ACP reductase polypeptide comprises an amino acid motif presented as SEQ ID NO:155, 156, 157, 158, 159, 160, 161, 162, 163, 164, or 165.

8. The engineered microorganism according to claim 5, wherein the acyl-ACP reductase polypeptide is encoded by a polynucleotide having at least 90% sequence identity to a sequence presented as SEQ ID NO: 138, 140, 142, 144, 146, 148, 150, 152, or 154.

9. A method of producing a fatty alcohol, the method comprising;
culturing an engineered microorganism according to claim 3, in the presence of a carbon source, under conditions wherein said fatty alcohol is produced at a titer of at least 300 mg/L.

10. A method of producing a fatty alcohol, the method comprising;
culturing an engineered microorganism according to claim 7, in the presence of a carbon source, under conditions wherein said fatty alcohol is produced at a titer of at least 300 mg/L.

11. The method according to claim 10, wherein the engineered microorganism is modified to express an attenuated level of an acyl-CoA synthase (EC 2.3.1.86).

12. The method according to claim 10, wherein the fatty alcohol biosynthetic polypeptide is a fatty aldehyde reductase or alcohol dehydrogenase (EC1.1.1.1) and the expression of polypeptide is increased relative to the corresponding wild type polypeptide.

13. The method according to claim 10, wherein the fatty alcohol biosynthetic polypeptide has at least 90% sequence identity to a polypeptide sequence selected from the group consisting of SEQ ID NO:1, 3, 5, 7, 9, 11, 13, 15, 17, 19, 21, 23, 25, 27, 29, 31, 33, 35, 37, and 39.

14. The method according to claim 10, wherein fatty alcohol biosynthetic polypeptide is encoded by a polynucleotide having at least 90% sequence identity to the nucleotide sequence presented as SEQ ID NO: 2, 4, 6, 8, 10, 12, 14, 16, 18, 20, 22, 24, 26, 28, 30, 32, 34, 36, 38, or 40.

15. The method of claim 10, wherein the fatty alcohol is spontaneously secreted from the microorganism, actively transported into the extracellular environment, or passively transported into the extracellular environment.

16. The method of claim 10, further comprising isolating the fatty alcohol from the culture.

17. The method of claim 10, wherein the fatty alcohol comprises a C₆-C₁₈ fatty alcohol.

18. The method of claim 10, wherein the fatty alcohol is a C₆, C₈, C₁₀, C₁₂, C₁₃, C₁₄, C₁₅, C₁₆, C₁₇, or C₁₈ fatty alcohol.

19. The method of claim 10, wherein the hydroxyl group is in the primary (C₁) position.

20. The method of claim 10, wherein the fatty alcohol is an unsaturated fatty alcohol.

21. The method of claim 20, wherein the unsaturated fatty alcohol is C10:1, C12:1, C14:1, C16:1, or C18:1.

22. The method of claim 20, wherein the fatty alcohol is unsaturated at the omega-7 position.

23. The method of claim 20, wherein the unsaturated fatty alcohol comprises a cis double bond.

24. The method of claim 10, wherein the fatty alcohol is a saturated fatty alcohol.

25. The method of claim 10, wherein the microorganism is selected from the group consisting of a yeast cell, a fungus cell, a filamentous fungi cell, and a bacterial cell.

26. An engineered microorganism according to claim 3, wherein the fatty alcohol biosynthetic polypeptide is a fatty aldehyde reductase or alcohol dehydrogenase (EC1.1.1.1) and the gene encoding said polypeptide is knocked-out.

27. An engineered microorganism according to claim 7, wherein the fatty alcohol biosynthetic polypeptide is a fatty aldehyde reductase or alcohol dehydrogenase (EC1.1.1.1) and the gene encoding said polypeptide is knocked-out.

28. The engineered microorganism according to claim 27, further comprising a polynucleotide sequence encoding a hydrocarbon biosynthetic polypeptide, having at least 90% sequence identity to the amino acid sequence of SEQ ID NO:166, 168, 170, 172, 174, 176, 178, 180, 182, 184, 186, 188, 190, 192, 194, 196, 198, or 200.

29. The engineered microorganism according to claim 27, wherein the hydrocarbon biosynthetic polypeptide has the amino acid sequence of SEQ ID NO:166, 168, 170, 172, 174, 176, 178, 180, 182, 184, 186, 188, 190, 192, 194, 196, 198, or 200 with one or more amino acid substitutions, additions, deletions, or insertions.

30. The engineered microorganism according to claim 27, wherein the hydrocarbon biosynthetic polypeptide has amino acid sequence having the amino acid motif sequences of (1) SEQ ID NO:202; (2) SEQ ID NO:203 or SEQ ID NO:204, or SEQ ID NO:205; (3) SEQ ID NO:206, and any one of SEQ ID NO:203, SEQ ID NO:204, SEQ ID NO:205; or (4) SEQ ID NO:207 or SEQ ID NO:208, or SEQ ID NO:209, or SEQ ID NO:210; wherein the hydrocarbon biosynthetic polypeptide has decarbonylase activity.

31. A method of producing a hydrocarbon, the method comprising;
culturing an engineered microorganism according to claim 30, in the presence of a carbon source, under conditions wherein said hydrocarbon is spontaneously secreted from the microorganism, actively transported into the extracellular environment, or passively transported into the extracellular environment.

32. The method according to claim 31, wherein the engineered microorganism is modified to express an attenuated level of an acyl-CoA synthase (EC 2.3.1.86).

33. The method of claim 31, wherein the hydrocarbon is secreted by the microorganism.

34. The method of claim 31, wherein the hydrocarbon is an alkane.

35. The method of claim 34, wherein the alkane comprises a C₁₃-C₂₁ alkane.

36. The method of claim 34, wherein the alkane is selected from the group consisting of tridecane, methyltridecane, nonadecane, methylnonadecane, heptadecane, methylheptadecane, pentadecane, and methylpentadecane.

37. The method of claim 31, further comprising culturing the microorganism in the presence of a saturated fatty acid derivative.

38. The method of claim 37, wherein the saturated fatty acid derivative is a C₁₄-C₂₂ saturated fatty acid derivative.

39. The method of claim 37, wherein the saturated fatty acid derivative is selected from the group consisting of 2-methylicosanal, icosanal, octadecanal, tetradecanal, 2-methyloctadecanal, stearaldehyde, palmitaldehyde, and their derivatives.

40. The method of claim 31, wherein the hydrocarbon is an alkene.

41. The method of claim 40, wherein the alkene comprises a C₁₃-C₂₂ alkene.

42. The method of claim 40, wherein the alkene is selected form the group consisting of pentadecene, heptadecene, methylpentadecene, and methylheptadecene.

43. The method of claim 31, further comprising culturing the microorganism in the presence of an unsaturated fatty acid derivative.

44. The method of claim 43, wherein the unsaturated fatty acid derivative is a C₁₄-C₂₂ unsaturated fatty acid derivative.

45. The method of claim 43, wherein the unsaturated fatty acid derivative is selected from the group consisting of octadecenal, hexadecenal, methylhexadecenal, and methyloctadecenal.

46. The method of claim 31, wherein the microorganism is selected from the group consisting of a yeast cell, a fungus cell, a filamentous fungi cell, and a bacterial cell

47. A hydrocarbon produced by the method of claim 31.

48. A biofuel comprising the hydrocarbon of claim 47.

49. The biofuel of claim 48, wherein the biofuel is a diesel, gasoline, or jet fuel.

50. The biofuel of claim 49, wherein the hydrocarbon has δ¹³C of −15.4 or greater.

51. The biofuel of claim 50, wherein the hydrocarbon has a f_{M}¹⁴C of at least 1.003.
